(19) United States
(12) Patent Application Publication
(10) Pub. No.: US 2015/0250867 A1
(43) Pub. Date: Sep. 10, 2015

(54) HPV/CYAA-BASED CHIMERIC PROTEINS AND THEIR USES IN THE INDUCTION OF IMMUNE RESPONSES AGAINST HPV INFECTION AND HPV-INDUCED DISORDERS

(71) Applicant: GENTICEL, Labege (FR)

(72) Inventors: Yolande Misseri, Dremil-Lafage (FR); Philippe Bridonneau, Rebigues (FR); Anne Goubier, Sauveterre De Bearn (FR)

(73) Assignee: GENTICEL, Labege (FR)

(21) Appl. No.: 14/416,384

(22) PCT Filed: Jul. 23, 2013
(86) PCT No.: PCT/EP2013/065549

§ 371 Date: Jan. 22, 2015

(30) Foreign Application Priority Data
Jul. 23, 2012 (EP) 12305898.4

(51) Int. Cl. A61K 39/12; C12N 9/88; C12N 7/00; C07K 14/005

(52) U.S. Cl. CPC A61K 39/12; C07K 14/005; C12N 9/88; C12N 7/00; C12Y 406/01001; C12N 2710/20034; C07K 2319/10; A61K 2039/6068

(57) ABSTRACT

The invention relates to a chimeric protein comprising or consisting of, from N-terminal to C-terminal, (a) a N-terminal part of a Bordetella CyaA protein (b) a heterologous polypeptide comprising antigens originating from different HPVs, and (c) a C-terminal part of a Bordetella CyaA protein. The invention also relates to a polynucleotide encoding this chimeric protein. A composition comprising at least one chimeric protein(s) of the invention and the prophylactic and/or therapeutic uses of said composition are also part of the invention.

### FIELD OF THE INVENTION

[0001] The invention relates to a chimeric protein comprising or consisting of, from N-terminal to C-terminal, (a) a N-terminal part of a Bordetella CyaA protein (b) a heterologous polypeptide comprising antigens originating from different HPVs, and (c) a C-terminal part of a Bordetella CyaA protein. The invention also relates to a polynucleotide encoding this chimeric protein. A composition comprising at least one chimeric protein(s) of the invention and the prophylactic and/or therapeutic uses of said composition are also part of the invention.

### BACKGROUND OF THE INVENTION

[0002] The Adenylate Cyclase (CyaA) of Bordetella types in particular of Bordetella pertussis, has been described extensively as a recombinant vector able to deliver efficiently polypeptides, such as antigens, into the cytosol of antigen-presenting cells (APC) [1], [2], [3]. More, recombinant CyaAs have been used to efficaciously treat mice that bear tumours [4], [5], [6].

[0003] Several authors have highlighted that the efficiency of polypeptide-delivery, in particular antigen-delivery, by CyaA (used as a vector) can be positively or negatively affected by electrostatic charge of the inserted polypeptide (antigen) and its conformation. In 1998, Karimova & al. [7] described that the delivery of CD8⁺ T-cell polypeptide epitopes, inserted in CyaA, to and into antigen-presenting cells was dependent on the electrostatic charge of the inserted epitopes: a recombinant CyaA harbouring the OVA epitope was able to translocate into APC and to induce a CTL response in vivo, while the same construct with 4 glutamic residues fused to the OVA epitope, could no more translocate, and did not induce a detectable Cytotoxic T-cell Lymphocyte (CTL) response in vivo. In 2012, Holubova et al. described various constructs based on CyaA: either CyaA proteins deleted within their N-terminal comprising the OVA epitope SIINFEKL, or CyaA proteins truncated for their N-terminal domain and comprising several epitopes inserted at different sites [25]. Holubova et al. concludes that their experiments provide a proof of concept for construction of CyaA-based antigen delivery having the entire AC domain replaced by large artificial CTL polyepitope.

[0004] In 2001, Gmira & al. [8] developed a new CyaA vector to facilitate construction of recombinant CyaAs with exogenous polypeptides or antigens inserted within their catalytic domains. These modifications were:
[0005] the insertion of a multi-cloning site sequence with new unique restriction sites downstream from codon 224;
[0006] the deletion of codons 225 to 234; and
[0007] the change of codons 236, 238 and 239; these modifications were introduced to increase the local electrostatic charge (less acidic), which was previously shown to be critical for translocation of this CyaA-antigen hybrid protein across the cellular membrane of in situ APC.

[0008] The modified CyaA had similar invasive activity as the wild type CyaA.

[0009] The authors have tested 5 antigens, whose size range from 87 to 206 residues, with an electrostatic charge from −4 to +14, and showed that those having an acidic value had lost their translocation efficiency, confirming previous results from Karimova et al. Moreover, they tested CyaAs with antigens with internal disulphide bridges or complex structures: none was able to translocate into the targeted cells, supporting the hypothesis that the polypeptides inserted in the catalytic domain of CyaA must unfold in order to be translocated.

TABLE 1
extracted from [7] and [8]. Inserts with an
acidic charge are not translocated into the cytosol of
APCs. The acidic charge is calculated from the number
of Lys and Arg residues minus the number of Asp and Glu residues.

| | | | | Antigen | |
|---|---|---|---|---|---|
| | | | | electro- | |
| | | | | static | |
| | | | Antigen | charge | Activ- |
| Refer- | | antigen name/ | size | (R/K- | ity (+ |
| ences | rCyaA | origin | (aa) | D/E) | or −) |
| Gmira | CyaA | None | NA | NA | + |
| et al., | CyaA- | Bovine neurocal- | 192 | −6 | − |
| 2001 | Neuro | cine δ | | | |
| | CyaA-Rest | Aspergillus | 148 | 5 | + |
| | | restrictus | | | |
| | | restrictocin | | | |
| | CyaA-DHFR | Mouse | 187 | 7 | + |
| | | Dihydrofolate | | | |
| | | reductase | | | |
| Karimova | CyaA-Tat | Tat HIV | 87 | 14 | + |
| et al., | CyaA-Nef | Nef HIV | 206 | −4 | − |
| 1998 | CyaA-Ova21 | Ova class I | 8 | 0 | + |
| | | epitope | | | |
| | CyaA- | Ova class I | 12 | −4 | − |
| | Ova21-4E | epitope + 4 | | | |
| | | glutamic acids | | | |

[0010] The antigens used in the case of tumour regression assays had either a short size (OVA is 8 residues in length) [4] or their secondary structure was disrupted by internal rearrangements of antigen segments and with a maximal size of 103 residues [5].

[0011] From these studies, the following conclusions to improve efficiency of vectorisation by the CyaA vector have been drawn:
[0012] Inclusion of acid regions in a polypeptide to be inserted into CyaA should be avoided; and
[0013] Inclusion of secondary and tertiary structures in these inserts should be avoided because such structures interfere with proper internalization of the enzymatic adenylate cyclase (AC) domain in which the polypeptide has been inserted.

[0014] In view of these conclusions, two recombinant CyaAs were constructed one containing the HPV16 E7 antigen and the other one the HPV18 E7 antigen. In addition a bivalent recombinant CyaA was also constructed in which the HPV16 and HPV18 E7 antigens have been inserted together (patent EP1576967; Préville et al.). However, no assay was reported with a recombinant CyaA into which more than 2 HPV E7 proteins have been inserted into the same CyaA vector.

[0015] Thus, Préville and al. discloses three recombinant CyaA vectors into which the E7 polypeptide of the HPV16 type or variants thereof has been inserted.
[0016] the CyaA-E7^{full} vector, containing the E7 protein full length,
[0017] the CyaA-E7_{Δ30-42} vector, containing E7 fragments deleted from the acidic domain from aa 30 to 42
[0018] the CyaA-E7₄₉₋₅₇ vector, containing a murine H-2D^{b}-restricted T cell epitope present on E7.

[0019] These recombinant CyaA vectors were used to immunize mice and to detect E7-specific CTL responses. To measure the immune response after mice immunisation, CTL Chrome Release assays were performed. In in vivo animal experiments, CyaA-E7_{Δ30-42} and CyaA-E7^{full} gave the most efficient CTL immune response compared to CyaA-E7₄₉₋₅₇

[0020] The ability of these recombinant CyaA vectors to induce tumour regression was also evaluated. If the rate of tumour regression conferred by CyaA-E7₄₉₋₅₇ and CyaA-E7^{full} could not be noticeably differentiated, CyaA-E7_{Δ30-42} was clearly superior in terms of tumour regression and growth inhibition. Thus, the single CTL epitope previously shown to be recognized in C57BL/6 mice has been proved to be efficient, but did not give the most optimal immune response.

[0021] The persistence of the immune response was then tested. Splenocytes from some surviving mice after 3 months were tested for their ability to lyse TC-1 cells expressing the E7 antigen and the other surviving animals were re-challenged with TC-1 cells at day 100 post vaccination. Animals vaccinated with CyaA-E7_{Δ30-42} displayed a high level of protection. Less than 40% of animals vaccinated with CyaA-E7₄₉₋₅₇ were protected while 90% to 100% of animals vaccinated with CyaA-E7_{Δ30-42} and CyaA-E7^{full} survived.

[0022] The following teachings can be extracted from this work:
[0023] CyaA vectors carrying HPV16 and/or HPV18 E7 proteins lead to an immune response in C57BL/6 mice;
[0024] a complete response is obtained with an antigen having both its CD8⁺ and CD4⁺ T cell epitopes, as compared to the E7₄₉₋₅₇ epitope which has a CD8⁺ T cell epitope only;
[0025] a superior efficiency is obtained in mice treated with the CyaA-E7_{Δ30-42} vector where the E7 protein is deleted of its acidic region from residues 30 to 42, as compared to mice treated with CyaA-E7^{full} or CyaA-E7₄₉₋₅₇;
[0026] the immune response obtained with these vectors is able to induce regression of tumour lesions;
[0027] a long lasting response is obtained, since a new challenge with TC-1 cells, in treated tumour free mice, is rejected; and
[0028] the co-injection of two recombinant CyaAs in order to develop a bivalent therapy is possible, each antigen keeping the response against its epitopes respectively.

[0029] Therefore, in the prior art, acidic amino acid stretches embedded in certain polypeptides or antigens and overall negatively charged polypeptides or antigens have been shown to alter the efficiency of a CyaA vector to translocate these polypeptides, across the cell membrane of APC in vaccinated animals. This leads to weak or no protective cellular immune responses against said antigens.

[0030] The inventors consider that this may be regarded as a drawback for the design of drug candidates, since such acidic amino acid sequences may contain important CD4⁺ epitopes and/or CD8⁺ epitopes, required for protective cellular immunity.

[0031] Therefore, there is still a need for improved vectors bearing immunogenic constructions which can be used to induce strong and long lasting cellular protective immune responses, in particular in tumour regression and tumour prevention, against polypeptides and antigens encompassing acidic amino acid stretches and against overall negatively charged polypeptides or antigen.

### BRIEF DESCRIPTION OF THE DRAWINGS

[0032] FIG. 1: (A) Schematic map of pKTRACE5-HPV16E7_{Δ30-42} in which relevant restriction sites and inserted sequences are indicated for CyaA-HPV16E7_{Δ30-42}; (B) Schematic map of pKTRACE5-HPV18E7_{Δ32-42} in which relevant restriction sites and inserted sequences are indicated for CyaA-HPV18E7_{Δ32-42}

[0033] FIG. 2: the gtCyaA protein and designed gtCyaA mutants. From aa (residues) 1 to 400, the catalytic domain (AC); from aa 401 to 1706, the haemolytic domain. Within the catalytic domain, three clear boxes represent the three regions described as essential for CyaA activity ([15], [16], [1]): the domain I (aa54-77) implicated in the interaction with ATP, the domain II (aa184-198) implicated in the interaction with Mg2+-ATP and the domain III (aa 287-318) implicated in the interaction with the Calmoduline (CaM). gtCyaAd93 corresponds to the gtCyaA sequence deleted for 93 aa (228-320). gtCyaAd203 corresponds to the gtCyaA sequence deleted for 203 aa. (184-386).

[0034] FIG. 3: (A) schematic map of the pGTPc608 vector comprising the gtCyaAd93-pep216 polynucleotide and cyaC optimized gene under the IPTG inducible promoter; (B) schematic map of the pGTPc608 vector comprising the gtCyaAd203-pep216 polynucleotide and cyaC optimized gene under the IPTG inducible promoter.

[0035] FIG. 4: CyaAd203-pep105 plasmid graphic map. Pep105 was cloned between EcoRI and Xmal restriction sites.

[0036] FIG. 5: Frequencies of HPV16 E7₄₉₋₅₇, HPV18 E7_{AS43-49} and OVA₂₅₇₋₂₆₄ and of specific CD8⁺ T lymphocytes and frequencies of HPV16 E7 (#116-2/3) and HPV18 E7 (#171-1/2/3) specific T lymphocytes, measured seven days post-immunisation with Placebo, ProCervix or CyaAd203-PEP105. Number of events per million of total splenocytes is shown. Total splenocytes were restimulated, from left to right, with medium (control), MHC class I restricted peptides HPV16 E7₄₉₋₅₇, HPV18 E7_{AS43-49}, OVA₂₅₇₋₂₆₄, #116-2/3 peptides banks and #171-1/2/3 peptides banks, during 20 h at 37° C., 5% CO₂.

[0037] FIG. 6: Frequencies of LCMV GP₃₃₋₄₁, OVA₃₂₃₋₃₃₉, MOG₃₅₋₅₅ and MAGEA3 specific T lymphocytes in measured seven days post-immunisation with Placebo, ProCervix or CyaAd203-PEP105; Number of events per million of total splenocytes is shown. Total splenocytes were, from left to right, restimulated with medium (control), LCMV GP₃₃₋₄₁, OVA₃₂₃₋₃₃₉, MOG₃₅₋₅₅ peptides, Histag MAGE-A3 protein, or restimulated in the presence of B16 tumour cells line B16-GFP and then B16-MAGEA3-GFP used as APC, all the restimulations during 20 h at 37° C., 5% CO₂.

[0038] FIG. 7: (A) Alignment of HPV16, 18 and 45 E7 protein sequences; black box: the pRB binding motif; grey boxes: the cysteines implicated in the Zinc-finger loop; the black arrow highlights the acidic region (B) Alignment of HPV31, 33, 52 and 58 protein sequences; black box: LXCXE motif; green boxes: Cysteines implicated in the Zinc-finger loop; dotted line box: for HPV52 E7 sequence, position of the auto-immune epitope.

[0039] FIG. 8: (A) Trivalent candidate vaccines antigens (B) Reshuffled antigen sequences of tetravalent candidate vaccines (N-ter: N-terminal part of the E7 protein; C-ter: C-terminal part of the E7 protein).

[0040] FIG. 9: protein expression profile after 3 h induction with IPTG (I0: before induction; I3: after induction)

[0041] FIG. 10: Frequencies of HPV16 E7₄₉₋₅₇ and HPV18 E7_{AS43-49} specific CD8⁺ T lymphocytes measured seven days post-immunisation; Total splenocytes were restimulated with MHC class I-restricted peptides. Results are expressed as number of cells that secreted IFN-γ per million of total splenocytes.

[0042] FIG. 11: Frequencies of HPV45 E7 specific IFN-γ secreting T lymphocytes measured seven days post-immunisation; Total splenocytes were restimulated with 15-mers overlapping peptides covering HPV45 E7 full peptide sequence (sub-pool 1: #218-1, sub-pool 2: #218-2, sub-pool 3: #218-3). Results are expressed as number of cells that secreted IFN-γ per million of total splenocytes.

[0043] FIG. 12: In vivo killing assay with trivalent candidates (Btpr_{—}114, Btpr115 & BTpr_{—}117); left panel: percentage of in vivo killing of splenocytes loaded with HPV18 E7 peptide libraries #171-1 and #171-2; right panel: percentage of in vivo killing of splenocytes loaded with HPV45 E7 peptide library #218-3.

[0044] FIG. 13: Therapeutic vaccination by Poly-ICLC-adjuvanted CyaA-candidate vaccines embedding the HPV16 E7 antigen lead to TC-1 induced solid tumour clearance; (A) Vaccination scheme: all mice were inoculated on the right flank at day 0 with TC-1 tumour cells; they were treated at day 11. (B) Monitoring of tumour growth until day 60.

[0045] FIG. 14: Prophylactic protection of mice that cleared the TC-1 tumour cell line against the growth of LL2-HPV18 E7 cell line or of LL2-GFP cell line (A) Vaccination schema: at day 65, mice that have cleared the TC-1 tumours were divided in two sub-groups and were inoculated either with LL2-HPV18 E7 cell line or with the control LL2-GFP cell line. (B) Monitoring of tumour growth until day 110.

[0046] FIG. 15: Frequencies of HPV16 E7, HPV18 E7 and HPV52 E7 specific T lymphocytes measured seven days post-immunisation—Total splenocytes were restimulated with 15-mers overlapping peptides covering HPV16, HPV18 and HPV52 E7 protein sequences. Sub-pools of peptides are indicated in the squares. Results are expressed as number of IFN-γ spots forming cells (sfc) per million of total splenocytes. HPV18 E7 sfc were too numerous to count (TNTC).

[0047] FIG. 16 (A, B, C, et D): Frequencies of IFN-γ secreting HPV16 E7, HPV18 E7, HPV33 E7 and HPV52 E7 specific T lymphocytes measured seven days post-immunisation. Total splenocytes were restimulated with 15-mers overlapping peptides covering HPV16, HPV18, HPV33 and HPV52 E7 full peptide sequences (each peptide bank is subdivided in sub-pools from the N-terminal to the C-terminal of the E7 protein (as indicated in histograms legends). Results are expressed as number of IFN-γ spots forming cells per million of total splenocytes.

[0048] FIG. 17 (A and B): E7-specific killing of cells loaded respectively with HPV16 E7 peptide library (FIG. 17-A) or HPV18 E7 peptide library (FIG. 17-B) induced by heptavalent candidate vaccines.

### DETAILED DESCRIPTION

[0049] The present inventors have developed new CyaA vectors which have been deleted in the adenylate cyclase (AC) domain of the wild type CyaA, and into which antigens of large size (illustrated with sequences having up to 441 amino acid residues but no limited thereto) and/or presenting highly negative electrostatic charges also designated as acidic charges (up to −46) have been inserted. The capacity of these constructs to induce specific CD8⁺ and CD4⁺ T-cell responses and cytotoxicity as well as their capacity to induce tumour rejections has been tested. Surprisingly, these new CyaA vectors have been shown to allow the delivery of antigens with high negative electrostatic charge to target cells. Moreover, when inserted into these new vectors, antigens with their acidic domain were more efficient, in cytotoxic assays performed under stringent conditions, as compared to the same antigens deprived of these acidic domains.

[0050] The invention is directed to a polynucleotide encoding a CyaA-derived protein, wherein said CyaA-derived protein comprises or consists of:

[0051] 1) a fragment of the Bordetella pertussis CyaA protein as set forth in SEQ ID NO: 2, the sequence of said fragment beginning with the first residue of SEQ ID NO:2 and ending with a residue located from position 183 to position 227 of SEQ ID NO:2 (i.e., between positions 182 and 228), fused to

[0052] 2) a fragment of the Bordetella pertussis CyaA protein as set forth in SEQ ID NO: 2, the sequence of said fragment beginning with a residue located from position 321 to position 387 of SEQ ID NO:2 (i.e., between positions 320 and 388) and ending with the last residue of SEQ ID NO:2.

[0053] SEQ ID NO: 2 represents the amino acid sequence of the wild type CyaA protein of Bordetella pertussis. A particular embodiment of a polynucleotide, encoding the CyaA as set forth in SEQ ID NO: 2, is as set forth in SEQ ID NO:1. Another particular embodiment of a polynucleotide, encoding the CyaA as set forth in SEQ ID NO: 2, is a modified version of sequence SEQ ID NO:1, by silent nucleotide mutations, i.e., by modifications which do not result in a change to the amino acid of SEQ ID NO:2. A particular modified version of SEQ ID NO:1 is a sequence, optimized for in expression E. coli, as set forth in SEQ ID NO:69. SEQ ID NO:69 is part of the invention. Within the present invention, a polynucleotide encoding a CyaA-derived protein of the invention does not encode or does not comprise a polynucleotide encoding SEQ ID NO:2. Moreover, a polynucleotide encoding a CyaA-derived protein of the invention does not comprise or does not consist of SEQ ID NO:1.

[0054] The resulting CyaA-derived protein of the invention obtainable from said polynucleotide of the invention comprises or consists of two fragments, fused together or recombined, of the same Bordetella CyaA protein. By “fragment”, it is meant a stretch or a concatenation of consecutive amino acid residues found in the sequence of the wild type Bordetella CyaA protein.

[0055] The first fragment (the N-terminal portion of the CyaA-derived polypeptide) begins with the first residue of SEQ ID NO:2 and ends with a residue located from position 183 to position 227 of SEQ ID NO:2.

[0056] This first fragment has a size ranging from 183 to 227 residues, i.e., is at least 183 residues and is at most 227 residues in length. In a particular embodiment, this fragment is at least 183, at least 190, at least 200, at least 210 or at least 220. In a particular embodiment, the size of this first fragment is 183 residues or is 227 residues.

[0057] Thus, this fragment begins with the first residue of SEQ ID NO:2 and ends with a residue selected from the group consisting of residues 183, 184, 185, 186, 187, 188, 189, 190, 191, 192, 193, 194, 195, 196, 197, 198, 199, 200, 201, 202, 203, 204, 205, 206, 207, 208, 209, 210, 211, 212, 213, 214, 215, 216, 217, 218, 219, 220, 221, 222, 223, 224, 225, 226 and 227 of SEQ ID NO: 2.

[0058] In other words, this first fragment comprises or consists of a sequence which is selected from the group consisting of residues 1-183, 1-184, 1-185, 1-186, 1-187, 1-188, 1-189, 1-190, 1-191, 1-192, 1-193, 1-194, 1-195, 1-196, 1-197, 1-198, 1-199, 1-200, 1-201, 1-202, 1-203, 1-204, 1-205, 1-206, 1-207, 1-208, 1-209, 1-210, 1-211, 1-212, 1-213, 1-214, 1-215, 1-216, 1-217, 1-218, 1-219, 1-220, 1-221, 1-222, 1-223, 1-224, 1-225, 1-226 and 1-227 of SEQ ID NO: 2.

[0059] In a particular embodiment, this first fragment comprises or consists of residues 1 to 227 of SEQ ID NO:2 or of residues 1 to 183 of SEQ ID NO:2.

[0060] In a particular embodiment, the polynucleotide encoding said first fragment begins with the first nucleotide of SEQ ID NO:1 or of SEQ ID NO:69 and ends with a nucleotide located from position 549 to position 681 of SEQ ID NO:1 or of SEQ ID NO:69, provided that the length of said nucleotide fragment is a multiple of 3. Thus, the polynucleotide encoding this fragment comprises or consists of a sequence which is selected from the group consisting of residues 1-549, 1-552, 1-555, 1-558, 1-561, 1-564, 1-567, 1-570, 1-573, 1-576, 1-579, 1-582, 1-585, 1-588, 1-591, 1-594, 1-597, 1-600, 1-603, 1-606, 1-609, 1-612, 1-615, 1-618, 1-621, 1-624, 1-627, 1-630, 1-633, 1-636, 1-639, 1-642, 1-645, 1-648, 1-651, 1-654, 1-657, 1-660, 1-663, 1-666, 1-669, 1-672, 1-675, 1-678 and 1-681 of SEQ ID NO: 1 or of SEQ ID NO:69.

[0061] The second fragment (the C-terminal portion of the CyaA-derived polypeptide) begins with a residue located from position 321 to position 387 of SEQ ID NO:2 and ends with the last residue of SEQ ID NO:2.

[0062] This second fragment has a size ranging from 1320 to 1386 residues, i.e., is at least 1320 residues and is at most 1386 residues in length. In a particular embodiment, this fragment is at least 1320, at least 1330, at least 1340, at least 1350, at least 1360, at least 1370 or at least 1380. In a particular embodiment, the size of this second fragment is 1320 residues or is 1386 residues.

[0063] Thus, this second fragment begins with a residue selected from the group consisting of residues 321, 322, 323, 324, 325, 326, 327, 328, 329, 330, 331, 332, 333, 334, 335, 336, 337, 338, 339, 340, 341, 342, 343, 344, 345, 346, 347, 348, 349, 350, 351, 352, 353, 354, 355, 356, 357, 358, 359, 360, 361, 362, 363, 364, 365, 366, 367, 368, 369, 370, 371, 372, 373, 374, 375, 376, 377, 378, 379, 380, 381, 382, 383, 384, 385, 386 and 387 of SEQ ID NO:2 and ends with the last residue (i.e., residue 1706) of SEQ ID NO:2.

[0064] In other words, this second fragment comprises or consists of a sequence which is selected from the group consisting of residues 321-1706, 322-1706, 323-1706, 324-1706, 325-1706, 326-1706, 327-1706, 328-1706, 329-1706, 330-1706, 331-1706, 332-1706, 333-1706, 334-1706, 335-1706, 336-1706, 337-1706, 338-1706, 339-1706, 340-1706, 341-1706, 342-1706, 343-1706, 344-1706, 345-1706, 346-1706, 347-1706, 348-1706, 349-1706, 350-1706, 351-1706, 352-1706, 353-1706, 354-1706, 355-1706, 356-1706, 357-1706, 358-1706, 359-1706, 360-1706, 361-1706, 362-1706, 363-1706, 364-1706, 365-1706, 366-1706, 367-1706, 368-1706, 369-1706, 370-1706, 371-1706, 372-1706, 373-1706, 374-1706, 375-1706, 376-1706, 377-1706, 378-1706, 379-1706, 380-1706, 381-1706, 382-1706, 383-1706, 384-1706, 385-1706, 386-1706 and 387-1706 of SEQ ID NO:2

[0065] In a particular embodiment, this second fragment comprises or consists of residues 321-1706 of SEQ ID NO:2 or of residues 387-1076 of SEQ ID NO:2.

[0066] In a particular embodiment, the polynucleotide encoding said second fragment begins with a nucleotide located from position 961 to position 1159 of SEQ ID NO:1 or of SEQ ID NO:69 and ends with the last nucleotide (i.e., nucleotide 5118) of SEQ ID NO:1 or of SEQ ID NO:69, provided that the length of said nucleotide fragment is a multiple of 3. Thus, the polynucleotide encoding this second fragment comprises or consist of a sequence which is selected from the group consisting of residues 961-5118, 964-5118, 967-5118, 970-5118, 973-5118, 976-5118, 979-5118, 982-5118, 985-5118, 988-5118, 991-5118, 994-5118, 997-5118, 1000-5118, 1003-5118, 1006-5118, 1009-5118, 1012-5118, 1015-5118, 1018-5118, 1021-5118, 1024-5118, 1027-5118, 1030-5118, 1033-5118, 1036-5118, 1039-5118, 1042-5118, 1045-5118, 1048-5118, 1051-5118, 1054-5118, 1057-5118, 1060-5118, 1063-5118, 1066-5118, 1069-5118, 1072-5118, 1075-5118, 1078-5118, 1081-5118, 1084-5118, 1087-5118, 1090-5118, 1093-5118, 1096-5118, 1099-5118, 1102-5118, 1105-5118, 1108-5118, 1111-5118, 1114-5118, 1117-5118, 1120-5118, 1123-5118, 1126-5118, 1129-5118, 1132-5118, 1135-5118, 1138-5118, 1141-5118, 1144-5118, 1147-5118, 1150-5118, 1153-5118, 1156-5118 and 1159-5118 of SEQ ID NO:1 or of SEQ ID NO:69.

[0067] In a particular embodiment, the CyaA-derived protein comprises or consists a polypeptide of the sequence as set forth in SEQ ID NO:10; SEQ ID NO:10 consists of a fragment consisting of residues 1 to 227 of SEQ ID NO:2 fused to a fragment consisting of residues 321 to 1706 of SEQ ID NO:2.

[0068] In another particular embodiment, the CyaA-derived protein comprises or consists of a polypeptide of the sequence as set forth in SEQ ID NO:12; SEQ ID NO:12 consists of a fragment consisting of residues 1 to 183 of SEQ ID NO:2 fused to a fragment consisting of residues 387 to 1706 of SEQ ID NO:2.

[0069] Other particular embodiments are also disclosed:
[0070] the CyaA-derived protein comprises or consists of a polypeptide of the sequence as set forth in SEQ ID NO:19, i.e., a sequence consisting a fragment consisting of residues 1 to 227 of SEQ ID NO:2 fused to a fragment consisting of residues 387 to 1706 of SEQ ID NO:2, and
[0071] the CyaA-derived protein comprises or consists of a polypeptide of the sequence as set forth in SEQ ID NO:20, i.e., a sequence consisting of a fragment consisting of residues 1 to 183 of SEQ ID NO:2 fused to a fragment consisting of residues 321 to 1706 of SEQ ID NO:2.

[0072] The expression “fused to” when reference is made to a protein or a polypeptide means that each peptide part (e.g., several CyaA fragments, and optionally a heterologous polypeptide) are covalently linked together by a peptide bond. The order of these different peptide parts is described herein as from N-terminal to C-terminal, i.e., the last C-terminal residue of a part is linked to the first N-residue of the other part by a peptide bond. The expression “fused to” when reference is made to a polynucleotide, means that two or more polynucleotide parts (e.g., several nucleotide CyaA fragments, and optionally a nucleotide encoding a heterologous polypeptide) are covalently linked together by a phosphodiester bond. The order of these different nucleotide parts is described herein as from 5′ to 3′, i.e., the last 3′ nucleotide of a part is linked to the first 5′ nucleotide of the other part by a phosphodiester bond. The polynucleotide consisting of the fusion of nucleotide sequences is in particular obtained as a recombinant polynucleotide, including by deletion of sequence fragments in the native coding sequence of cyaA.

[0073] The invention also concerns a polynucleotide encoding a variant CyaA-derived protein, wherein said first fragment is a variant with at least 95% similarity with a fragment of the Bordetella pertussis CyaA protein as set forth in SEQ ID NO: 2, the sequence of said fragment beginning with the first residue of SEQ ID NO:2 and ending with a residue located from position 183 to position 227 of SEQ ID NO:2, and/or wherein said second fragment is a variant with at least 95% similarity with a fragment beginning with a residue located from position 321 to position 387 of SEQ ID NO:2 and ending with the last residue of SEQ ID NO:2.

[0074] By “a variant with at least 95% similarity” when reference is made to a protein or a polypeptide, it is meant a protein sequence whose amino acid identity is at least 95%, at least 96%, at least 97%, at least 98% or at least 99% with the polypeptide from which it varies. The percentage of similarity is calculated, comparing the full-length sequence of both said variant and said polypeptide from which it varies, in particular over the shorter of the two sequences. Thus, a variant has 95% of similarity with a polypeptide, when 5% of its residues differ from the residues of this polypeptide, by one or more addition(s) and/or one or more deletion(s) and/or one or more substitution(s). In a particular embodiment, said variant differs from said polypeptide only by substitutions, preferably conservative substitutions and accordingly it keeps the same length as the sequence from which it varies. In another embodiment, said variant differs from said polypeptide by at least 1 single amino-acid deletion, preferably by 1, 2, 3, 4 or 5 single amino-acid deletion(s), and by substitutions, preferably conservative substitutions.

[0075] The invention also relates to polynucleotide variants having a similarity of at least 75% with the polynucleotides encoding portions (or fragments) of SEQ ID NO:1. In a particular embodiment, the polynucleotide encoding said first fragment has a similarity of 75% with a polynucleotide beginning with the first nucleotide of SEQ ID NO:1 and ends with a nucleotide located from position 549 to position 681 of SEQ ID NO:1 provided that the length of said nucleotide fragment is a multiple of 3. In another embodiment, independently or in combination with the above statement, the polynucleotide encoding said second fragment has a similarity of 75% with a polynucleotide beginning with a nucleotide located from position 961 to position 1159 of SEQ ID NO:1 and ends with the last nucleotide (i.e., nucleotide 5118) of SEQ ID NO:1, provided that the length of said nucleotide fragment is a multiple of 3. In a particular embodiment, the polynucleotides encoding said first and second fragments originate from a polynucleotide, the full-length sequence of which has at least 75% similarity with SEQ ID NO:1. An example of such variant is SEQ ID NO:69. In a particular embodiment, the polynucleotide variant results from degeneracy of the genetic code applied to the polynucleotide obtained from SEQ ID NO:1 as disclosed above or to the polynucleotide of SEQ ID NO:69. In a particular embodiment, the polynucleotide variant thus obtained has a degenerated base at the wobble position.

[0076] By “a variant with at least 75% similary” when reference is made to a polynucleotide, it is meant a nucleotide sequence whose nucleotide identity is at least 75%, at least 79%, at least 80%, at least 85%, at least 90%, at least 95%, at least 96%, at least 97%, at least 98% or at least 99% with the polynucleotide from which it varies. The percentage of similarity is calculated, comparing the full-length sequence of both said variant and the polynucleotide from which it varies, in particular over the shorter of the two sequences. Thus, a variant has 75% of similarity with a polynucleotide, when 25% of its nucleotides differ from the nucleotides of said polynucleotide, by one or more nucleotide addition(s) and/or one or more nucleotide deletion(s) and/or one or more nucleotide substitution(s). In a particular embodiment, said variant differs only by nucleotide substitutions, and accordingly it keeps the same length as the sequence from which it varies. In a particular embodiment, said variant differs only by nucleotide silent mutations, and accordingly it keeps encoding the same protein as the one encoding by the sequence from which it varies. In a particular embodiment, said variant differs only by nucleotide substitutions, a part of them being silent mutations, such that the sequence of the protein encoded by said polynucleotide variant has at least 95% of similarity with a protein or polypeptide of the invention, or has 100% identity.

[0077] Nucleotide and protein similarity percentages as indicated herein may be calculated by well known programs based on the Needleman and Wunsch algorithm, such as MeAlign [18].

[0078] In a particular embodiment, the variant CyaA-derived protein as defined herein keeps its capacity to bind to target cells and/or to translocate its adenylate cyclase (AC) domain into the cytosol of the target cells. In a particular embodiment, target cells are CD11b-expressing cells, i.e., cells that express the CD11b/CD18 receptor on their surface (CD11b⁺). In particular, these cells are granulocytes/neutrophils, macrophages, NK cells, subsets of T CD8⁺, subsets of B cells, dendritic cells such as Langerhans cells, or myeloid dendritic cells.

[0079] The capacity of the variants of the invention to bind to target cells can be assayed especially according to the methods disclosed in EP03291486 or in WO02/22169 application. Furthermore, the capacity of the variant to translocate its N-terminal domain into the cytosol of target cells can be assayed by applying the method described in WO02/22169 application, or the method detailed in example A with the p105 peptide.

[0080] Variants of the full-length wild type sequence of the Bordetella pertussis CyaA protein are known; illustration of such variants is provided by reference to their sequence as set forth in SEQ ID NO: 4 (CyaA protein of Bordetella hinzii), SEQ ID NO: 6 (CyaA protein of Bordetella parapertussis) and SEQ ID NO: 8 (CyaA protein of Bordetella bronchiseptica). The nucleotide sequence, encoding SEQ ID NOs: 4, 6 and 8, is as set forth in SEQ ID NOs:3, 5 and 7 respectively or is a variant of SEQ ID NOs:3, 5 and 7 by silent mutations. Within the present invention, the CyaA-derived protein does not comprise or does not consist of SEQ ID NOs: 2, 4, 6 and 8. Moreover, a polynucleotide encoding a variant CyaA-derived protein of the invention does not comprise or does not consist of SEQ ID NOs: 3, 5 or 7.

[0081] In a particular embodiment of the invention, a polynucleotide encoding a variant CyaA-derived protein, preferably as variant of a B. pertussis CyaA-derived protein as defined herein, is a polynucleotide encoding a polypeptide comprising or consisting of:

[0082] (a) a fragment of the Bordetella CyaA protein as set forth in SEQ ID NO: 4, 6 or 8, the sequence of said fragment beginning with the first residue of SEQ ID NO:4, 6 or 8 and ending with a residue located from position 183 to position 227 of SEQ ID NO:4, 6 or 8, fused to

[0083] (b) a fragment of the Bordetella CyaA protein as set forth respectively in SEQ ID NO: 4, 6 or 8, the sequence of said fragment beginning with a residue located from position 321 to position 387 of SEQ ID NO: 4, 6 or 8 and ending with the last residue of SEQ ID NO: 4, 6 or 8.

[0084] The definitions given above for the particular CyaA-derived protein comprising fragments of SEQ ID NO:2 apply identically to the variant CyaA-derived protein comprising fragments of SEQ ID NO:4 and 6.

[0085] Regarding the variant CyaA-derived protein comprising fragments of SEQ ID NO:8, all definitions apply identically, with the exception of the last residue of SEQ ID NO:8 is residue 1705 instead of residue 1706. Therefore, for the variant CyaA-derived protein comprising fragments of SEQ ID NO:8, all aspects referring to residue 1706 must be replaced by residue 1705. In particular, the second fragment has a size ranging from 1319 to 1385 residues, and is preferably 1319 residues or 1385 residues in length. Regarding a polynucleotide encoding variant CyaA-derived protein comprising fragments of SEQ ID NO: 8, all definitions and embodiments referring to nucleotide 5118 must be replaced by nucleotide 5115.

[0086] Particular polynucleotides encoding variant CyaA-derived proteins of the invention are selected among a polynucleotide comprising or consisting of:

[0087] 1) a polynucleotide encoding the polypeptide as set forth in SEQ ID NO:13; SEQ ID NO:13 consists of a fragment consisting of residues 1 to 227 of SEQ ID NO:4 fused to a fragment consisting of residues 321 to 1706 of SEQ ID NO:4;

[0088] 2) a polynucleotide encoding the polypeptide as set forth in SEQ ID NO:14; SEQ ID NO:14 consists of a fragment consisting of residues 1 to 183 of SEQ ID NO:4 fused to a fragment consisting of residues 387 to 1706 of SEQ ID NO:4;

[0089] 3) a polynucleotide encoding the polypeptide as set forth in SEQ ID NO:15; SEQ ID NO:15 consists of a fragment consisting of residues 1 to 227 of SEQ ID NO:6 fused to a fragment consisting of residues 321 to 1706 of SEQ ID NO:6;

[0090] 4) a polynucleotide encoding the polypeptide as set forth in SEQ ID NO:16; SEQ ID NO:16 consists of a fragment consisting of residues 1 to 183 of SEQ ID NO:6 fused to a fragment consisting of residues 387 to 1706 of SEQ ID NO:6;

[0091] 5) a polynucleotide encoding the polypeptide as set forth in SEQ ID NO:17; SEQ ID NO:17 consists of a fragment consisting of residues 1 to 227 of SEQ ID NO:8 fused to a fragment consisting of residues 321 to 1705 of SEQ ID NO:8; and

[0092] 6) a polynucleotide encoding the polypeptide as set forth in SEQ ID NO:18; SEQ ID NO:18 consists of a fragment consisting of residues 1 to 183 of SEQ ID NO:8 fused to a fragment consisting of residues 387 to 1705 of SEQ ID NO:8.

[0093] The polynucleotide encoding the CyaA-derived protein or the variant CyaA-derived protein of the invention may also be defined as a deleted version of the full-length Bordetella CyaA coding nucleotide sequence, i.e., a polynucleotide encoding a polypeptide comprising or consisting of SEQ ID NO:2, 4, 6 or 8 to the extent that it is deleted for a polynucleotide encoding a polypeptide fragment whose first amino acid residue is located from residue 184 to residue 228 of SEQ ID NO: 2, 4, 6 or 8 respectively, and whose last amino acid residue is located from residue 320 to residue 386 of SEQ ID NO: 2, 4, 6 or 8 respectively. In a particular embodiment, said polynucleotide encodes a polypeptide comprising or consisting of SEQ ID NO:2, 4, 6 or 8, which is deleted for a polynucleotide encoding a polypeptide fragment whose first amino acid residue is selected from the group consisting of residues 184, 185, 186, 187, 188, 189, 190, 191, 192, 193, 194, 195, 196, 197, 198, 199, 200, 201, 202, 203, 204, 205, 206, 207, 208, 209, 210, 211, 212, 213, 214, 215, 216, 217, 218, 219, 220, 221, 222, 223, 224, 225, 226, 227 and 228 of SEQ ID NO: 2, 4, 6 or 8 respectively, and whose last amino acid residue is selected from the group consisting of residues 320, 321, 322, 323, 324, 325, 326, 327, 328, 329, 330, 331, 332, 333, 334, 335, 336, 337, 338, 339, 340, 341, 342, 343, 344, 345, 346, 347, 348, 349, 350, 351, 352, 353, 354, 355, 356, 357, 358, 359, 360, 361, 362, 363, 364, 365, 366, 367, 368, 369, 370, 371, 372, 373, 374, 375, 376, 377, 378, 379, 380, 381, 382, 383, 384, 385 or 386 of SEQ ID NO: 2, 4, 6 or 8 respectively.

[0094] A method to produce a polynucleotide encoding the CyaA-derived protein in particular a variant CyaA-derived protein of the invention as described herein is also part of the invention. This method comprises the steps of (a) deleting, from a polynucleotide encoding the Bordetella CyaA as set forth in SEQ ID NO: 2, 4, 6 or 8, a nucleotide fragment of consecutive nucleotide residues in said sequences, the first three nucleotides of which encode an amino acid residue located from residue 184 to residue 228 of SEQ ID NO: 2, 4, 6 or 8, and the last three nucleotides of which encode an amino acid residue located from residue 320 to residue 386 of SEQ ID NO: 2, 4, 6 or 8; and (b) recovering said polynucleotide.

[0095] Alternatively, the polynucleotide encoding the CyaA-derived protein is chemically synthesized, using conventional methods, according to the sought CyaA-derived protein sequence, and optionally taking into account the degeneracy of the genetic code and/or the optimization of expression.

[0096] The invention is also directed to the CyaA derived proteins encoded by the polynucleotides of the invention, described herein. Particular CyaA derived proteins consist of a sequence as set forth in SEQ ID NO: 10, 12, 13, 14, 15, 16, 17, 18, 19 and 20.

[0097] Within the frame of the invention, a polynucleotide encoding a CyaA-derived protein, including a variant CyaA-derived protein is used to produce a chimeric polynucleotide of the invention encoding a chimeric protein comprising or consisting of said CyaA-derived protein or variant CyaA-derived protein, and a heterologous polypeptide, wherein the polynucleotide encoding said heterologous polypeptide substitutes the deleted nucleotide fragment of CyaA.

[0098] Accordingly the invention relates to a chimeric polynucleotide, i.e., a polynucleotide encoding a chimeric protein as defined herein, wherein each and every embodiments disclosed herein in relation to the polynucleotide encoding the CyaA derived protein applies.

[0099] Thus, the invention also relates to a method to produce a polynucleotide encoding a chimeric protein, comprising:

[0100] (a) deleting, from a polynucleotide encoding the Bordetella CyaA as set forth in SEQ ID NO: 2, 4, 6 or 8 or encoding a variant with at least 95% similarity with SEQ ID NO: 2, a nucleotide fragment, the first three nucleotides of which encode an amino acid residue located from residue 184 to residue 228 of SEQ ID NO: 2, 4, 6 or 8, whose the last 3 nucleotides of which encode an amino acid residue located from residue 320 to residue 386 of SEQ ID NO: 2, 4, 6 or 8;

[0101] (b) inserting, in the polynucleotide obtained in (a) and at the site of the deleted nucleotide fragment, a polynucleotide encoding a heterologous polypeptide; wherein steps (a) and (b) may be carried out in any order or simultaneously; and

[0102] (c) recovering said polynucleotide encoding a chimeric protein.

[0103] The invention also relates to a method to produce a chimeric protein, comprising:

[0104] (a) deleting, from a polynucleotide encoding the Bordetella CyaA as set forth in SEQ ID NO: 2, 4, 6 or 8 or encoding a variant with at least 95% similarity with SEQ ID NO: 2, a nucleotide fragment, the first three nucleotides of which encode an amino acid residue located from residue 184 to residue 228 of SEQ ID NO: 2, 4, 6 or 8, whose the last 3 nucleotides of which encode an amino acid residue located to from residue 320 to residue 386 of SEQ ID NO: 2, 4, 6 or 8;

[0105] (b) inserting, in the polynucleotide obtained in (a) and at the site of the deleted nucleotide fragment, a polynucleotide encoding a heterologous polypeptide; wherein steps (a) and (b) may be carried out in any order or simultaneously;

[0106] (c) expressing, in a cell, the polynucleotide obtained in (b); and

[0107] (d) recovering said expressed chimeric protein.

[0108] The method to produce the chimeric protein of the invention may further comprise the step of combining in a chimeric polynucleotide construct the polynucleotide obtained in step (b) and a polynucleotide encoding the CyaC protein. In a preferred embodiment the polynucleotide obtained in step (b) and a polynucleotide encoding the CyaC protein are combined in a construct in such a way that following said combination, the obtained chimeric polynucleotide comprises or contains, from 5′ end to 3′ end, the polynucleotide construct of step (b) followed by a polynucleotide construct encoding a CyaC protein of a Bordetella strain, in particular of a Bordetella pertussis strain.

[0109] Within the present invention, when reference is made to the “first three nucleotides” or the “last three nucleotides”, it is understood that these three nucleotides refer to a codon which corresponds, according to the genetic code, to a amino acid residue identified by its position in SEQ ID NO: 2, 4, 6 or 8. Thus, the size of the polynucleotide nucleotide deletion is a multiple of 3. Moreover, in addition to be a multiple of 3 in size, the polynucleotide nucleotide deletion is in frame, i.e., the deletion removes the sought amino acid residues, without modifying the reading frame, nor modifying the residues surrounding (upstream and downstream) the deletion.

[0110] The order of the steps of deletion and of the step of insertion is indifferent and both steps can be carried out simultaneously.

[0111] In a first embodiment of the method, the step of deletion is implemented before the step of insertion. Thus, once the deletion of the fragment has been carried out, the polynucleotide encoding the heterologous polypeptide is inserted at the site of the deleted nucleotide fragment. By “at the site of the deleted nucleotide fragment”, it is meant that the polynucleotide encoding the heterologous polypeptide is inserted between the N-terminal side of CyaA (corresponding to the first CyaA fragment) and the C-terminal side of CyaA (corresponding to the second CyaA fragment). The site of insertion can be easily identified, since the sequence of both the N-terminal side and the C-terminal side of CyaA are identical to the sequence of the N-terminal part and C-terminal part of SEQ ID NO:2, 4, 6 or 8 or variants according to the invention.

[0112] In a second embodiment, the step of insertion is implemented before the step of deletion. Once the fragment to be deleted has been identified, the polynucleotide encoding the heterologous polypeptide is inserted either upstream (in 5′) of the three nucleotides (codon) encoding the first residue of the fragment to be deleted, or downstream (in 3′) of the last three nucleotides (codon) encoding the last residue of the fragment to be deleted. Once the insertion of the polynucleotide encoding the heterologous polypeptide has been made, the fragment to be deleted is excised from the polynucleotide encoding the CyaA/heterologous polypeptide molecule.

[0113] In a third embodiment, both steps of deletion and of insertion are carried out simultaneously, i.e., in a single reaction step, using appropriate restriction enzymes.

[0114] In a particular embodiment of the method, the step of deletion comprises removing, from a polynucleotide encoding a Bordetella CyaA as set forth in SEQ ID NO: 2, 4, 6 or 8, a nucleotide fragment encoding the residues 228 to 320 of SEQ ID NO: 2, 4, 6 or 8, or a nucleotide fragment encoding the residues 184 to 386 of SEQ ID NO: 2, 4, 6 or 8, or a nucleotide fragment encoding the residues 228 to 386 of SEQ ID NO: 2, 4, 6 or 8, or a nucleotide fragment encoding the residues 184 to 320 of SEQ ID NO: 2, 4, 6 or 8 or variants according to the invention.

[0115] In another embodiment, the step of deletion comprises removing, from a polynucleotide as set forth in SEQ ID NO: 1, 3, 5 or 7 or SEQ ID NO:69, a nucleotide fragment consisting of nucleotides 682 to 960 of SEQ ID NO: 1, 3, 5 or 7 or SEQ ID NO:69, or a nucleotide fragment consisting of nucleotides 550 to 1158 of SEQ ID NO: 1, 3, 5 or 7 or SEQ ID NO:69, or a polynucleotide as set forth in SEQ ID NO: 1, 3, 5 or 7 or SEQ ID NO:69, or a nucleotide fragment consisting of nucleotides 682 to 1158 of SEQ ID NO: 1, 3, 5 or 7 or SEQ ID NO:69, or a nucleotide fragment consisting of nucleotides 550 to 960 of SEQ ID NO: 1, 3, 5 or 7 or SEQ ID NO:69.

[0116] To carry out the fragment deletion, the skilled person will possibly need to perform a larger deletion in the CyaA encoding polynucleotide and will then compensate when cloning the polynucleotide encoding the heterologous polypeptide to achieve the above disclosed deletion as a final result.

[0117] Alternatively, the chimeric polynucleotide encoding the chimeric protein of the invention is chemically synthesized, using conventional methods, according to the sought chimeric protein sequence, and optionally taking into account the degeneracy of the genetic code and/or the optimization of expression. Thus, said chemically synthesized polynucleotide is expressed in a cell and the expressed chimeric protein is thus recovered.

[0118] The invention also relates to a polynucleotide encoding a chimeric protein, said polynucleotide comprising or consisting, from 5′ to 3′, (a) a polynucleotide encoding a fragment of the Bordetella pertussis CyaA protein as set forth in SEQ ID NO: 2, the sequence of said fragment beginning with the first residue of SEQ ID NO:2 and ending with a residue located from position 183 to position 227 of SEQ ID NO:2, or a variant with at least 95% similarity with said fragment, (b) a polynucleotide encoding a heterologous polypeptide and (c) a polynucleotide encoding a fragment of the Bordetella pertussis CyaA protein as set forth in SEQ ID NO: 2, the sequence of said fragment beginning with a residue located from position 321 to position 387 of SEQ ID NO:2 and ending with the last residue of SEQ ID NO:2 or a variant with at least 95% similarity with said fragment.

[0119] The definitions described above for the CyaA-derived protein, regarding the fragment of the Bordetella pertussis CyaA protein as set forth in SEQ ID NO: 2, the sequence of said fragment beginning with the first residue of SEQ ID NO:2 and ending with a residue located from position 183 to position 227 of SEQ ID NO:2, and regarding the fragment of the Bordetella pertussis CyaA protein as set forth in SEQ ID NO: 2, the sequence of said fragment beginning with a residue located from position 321 to position 387 of SEQ ID NO:2 and ending with the last residue of SEQ ID NO:2, apply identically to these fragments in the context of the polynucleotide encoding a chimeric protein.

[0120] The definitions described above regarding variants with at least 95% apply identically to the variants of the fragments described in the context of the polynucleotide encoding a chimeric protein.

[0121] In a particular embodiment, said polynucleotide encoding a chimeric protein is selected from the group consisting of:

[0122] 1) a polynucleotide comprising or consisting of, from 5′ to 3′, (a) a polynucleotide encoding a polypeptide fragment consisting of residues 1 to 227 of SEQ ID NO:2, 4 or 6, (b) a polynucleotide encoding a heterologous polypeptide, and (c) a polynucleotide encoding a polypeptide fragment consisting of residues 321 to 1706 of SEQ ID NO:2, 4 or 6;

[0123] 2) a polynucleotide comprising or consisting of, from 5′ to 3′, (a) a polynucleotide encoding a polypeptide fragment consisting of residues 1 to 227 of SEQ ID NO:8, (b) a polynucleotide encoding a heterologous polypeptide, and (c) a polynucleotide encoding a polypeptide fragment consisting of residues 321 to 1705 of SEQ ID NO:8;

[0124] 3) a polynucleotide comprising or consisting of, from 5′ to 3′, (a) a polynucleotide encoding a polypeptide fragment consisting of residues 1 to 183 of SEQ ID NO:2, 4 or 6, (b) a polynucleotide encoding a heterologous polypeptide, and (c) a polynucleotide encoding a polypeptide fragment consisting of residues 387 to 1706 of SEQ ID NO:2, 4 or 6;

[0125] 4) a polynucleotide comprising or consisting of, from 5′ to 3′, (a) a polynucleotide encoding a polypeptide fragment consisting of residues 1 to 183 of SEQ ID NO:8, (b) a polynucleotide encoding a heterologous polypeptide, and (c) a polynucleotide encoding a polypeptide fragment consisting of residues 387 to 1705 of SEQ ID NO:8;

[0126] 5) a polynucleotide comprising or consisting of, from 5′ to 3′, (a) a polynucleotide encoding a polypeptide fragment consisting of residues 1 to 227 of SEQ ID NO:2, 4 or 6, (b) a polynucleotide encoding a heterologous polypeptide, and (c) a polynucleotide encoding a polypeptide fragment consisting of residues 387 to 1706 of SEQ ID NO:2, 4 or 6;

[0127] 6) a polynucleotide comprising or consisting of, from 5′ to 3′, (a) a polynucleotide encoding a polypeptide fragment consisting of residues 1 to 227 of SEQ ID NO:8, (b) a polynucleotide encoding a heterologous polypeptide, and (c) a polynucleotide encoding a polypeptide fragment consisting of residues 387 to 1705 of SEQ ID NO:8;

[0128] 7) a polynucleotide comprising or consisting of, from 5′ to 3′, (a) a polynucleotide encoding a polypeptide fragment consisting of residues 1 to 183 of SEQ ID NO:2, 4 or 6, (b) a polynucleotide encoding a heterologous polypeptide, and (c) a polynucleotide encoding a polypeptide fragment consisting of residues 321 to 1706 of SEQ ID NO:2, 4 or 6; and

[0129] 8) a polynucleotide comprising or consisting of, from 5′ to 3′, (a) a polynucleotide encoding a polypeptide fragment consisting of residues 1 to 183 of SEQ ID NO:8, (b) a polynucleotide encoding a heterologous polypeptide and (c) a polynucleotide encoding a polypeptide fragment consisting of residues 321 to 1705 of SEQ ID NO:8;

[0130] In a particular embodiment of any polynucleotide encoding a chimeric protein as defined herein, the polynucleotide of (a) is fused to the polynucleotide of (b) which is itself fused to the polynucleotide of (c).

[0131] Within the present invention, the polynucleotide encoding the heterologous polypeptide has a size which is a multiple of 3, in order to keep the reading frame of the polynucleotide of (c) (e.g., the reading frame of the fragment of the Bordetella pertussis CyaA protein as set forth in SEQ ID NO: 2, the sequence of said fragment beginning with a residue located from position 321 to position 387 of SEQ ID NO:2 and ending with the last residue of SEQ ID NO:2, or variant thereof).

[0132] In a particular embodiment of the invention, the chimeric polynucleotide further comprises, at its 3′ end a polynucleotide encoding the CyaC protein of a Bordetella strain, in particular of a Bordetella pertussis strain.

[0133] A polynucleotide encoding a chimeric protein can be obtained or obtainable by the method described herein.

[0134] The invention is also directed to a nucleic acid vector, such as a plasmid, comprising a polynucleotide as defined herein, i.e., either a polynucleotide encoding a CyaA derived protein including a variant CyaA derived protein, or a polynucleotide encoding a chimeric protein. In a particular embodiment, the vector is an expression vector, i.e., a vector which comprises, besides the elements explicitly mentioned, all the elements necessary to drive the expression of the polynucleotide of the invention (expression control sequence), and particularly transcription regulatory elements.

[0135] “Transcription regulatory element” defines any DNA regions involved in the regulation of transcription of the polynucleotide and encompasses a promoter, such as a promoter inducible by IPTG, for example lac, tac or T7 promoter, or a promoter inducible by temperature shift, for example phage lambda pR or pL promoter, enhancer or cis-acting regulatory elements. These elements, and particularly the promoter, are chosen depending upon the nature of the cells to be transfected with the nucleic acid vector. The determination of the suitable promoter, according to the expression level sought or to the transfected cell, makes part of the knowledge of the person skilled in the art. In a particular embodiment, said vector is a plasmid. Examples of conventional plasmids suitable for the preparation of the vector of the invention are pUC or pBR322.

[0136] In a particular embodiment, said nucleic acid vector also comprises the CyaC coding sequence of a Bordetella strain, such as the cyaC gene of B. pertussis as set forth in SEQ ID NO:21. In another embodiment, said nucleic acid vector also comprises a version of the CyaC coding sequence of a Bordetella strain which is optimized for a better expression in a particular cell type, in particular optimized for a better expression in E. coli. An optimized version of the CyaC sequence for E. coli is as set forth in SEQ ID NO:22.

[0137] Particular plasmids which can be used to produce a chimeric protein as defined in the invention are the ones described in the material and methods, and whose sequences are as set forth in SEQ ID NOs: 59, 62, 65 and 68. The polynucleotide encoding the heterologous polypeptide contained in these four plasmids can be removed and replaced by a polynucleotide encoding a heterologous polypeptide as described herein. Thus, starting from the plasmid of SEQ ID NO:59, the sequence contained between nucleotides 904 and 1731 is removed and replaced by a polynucleotide encoding a heterologous polypeptide as described herein. Alternatively, starting from the plasmid of SEQ ID NO:62, the sequence contained between nucleotides 772 and 1599 is removed and replaced by a polynucleotide encoding a heterologous polypeptide as described herein. Alternatively, starting from the plasmid of SEQ ID NO:65, the sequence contained between nucleotides 904 and 1836 is removed and replaced by a polynucleotide encoding a heterologous polypeptide as described herein. Alternatively, starting from the plasmid of SEQ ID NO:68, the sequence contained between nucleotides 772 and 1704 is removed and replaced by a polynucleotide encoding a heterologous polypeptide as described herein.

[0138] It is noteworthy that, when the nucleic vector contains several polynucleotides, the transcription regulatory element(s) may be unique for all the polynucleotides or shared by some of them or in contrast each polynucleotide may be associated with one or more particular transcription regulatory element(s). In the latter case, the several transcription regulatory elements may be similar or different.

[0139] The invention is also directed to a cell (preferably isolated) or a cell culture comprising a polynucleotide as defined herein, i.e., either a polynucleotide encoding a CyaA derived protein including a variant CyaA derived protein, or a polynucleotide encoding a chimeric protein, or comprising a vector as defined herein. In a particular embodiment, said cell or cell culture is transfected with a vector of the invention.

[0140] Said cell can be a prokaryotic or a cell culture made of prokaryotic cells. In a particular embodiment, said cell is suitable to express and/or to produce recombinant protein(s). In a particular embodiment, said cell or cell culture is a bacterium or a bacteria culture. In a preferred embodiment, said cell or cell culture is an E. coli strain culture, such as the BL21, BLR, TG1 or HMS174 strain.

[0141] Thus, the cell or cell culture of the invention expresses the polynucleotide of the invention, i.e., either a polynucleotide encoding a CyaA derived protein including variant CyaA derived protein, or a polynucleotide encoding a chimeric protein, and when appropriate, simultaneously the cyaC gene or an optimized version of the cyaC gene.

[0142] The term “CyaA” or “CyaA-derived protein” or “chimeric protein” encompasses, and preferably is, a post-translational modified version of the Bordetella CyaA protein. Thus, in a particular embodiment, said “CyaA-derived protein” or “chimeric protein” of the invention is modified by post-translational acylation of at least one of its residues, in particular at least one of the two, preferably the two, lysine residues corresponding to the residues located in positions 860 and 983 of the full length sequence of B. pertussis, B. hinzii or B parapertussis CyaA or corresponding to the residues located in positions 859 and 982 of the full length sequence of B. bronchiseptica CyaA. By “acylation”, it is meant herein palmitoylation, i.e., addition of palmitate and/or palmitoleate group(s) on residue(s) of CyaA, of the CyaA-derived protein or of the chimeric protein of the invention. Thus, said “CyaA-derived protein” or “chimeric protein” bears a palmitoyl group on some of these residues, preferably on one of the two, or the two, lysine residues corresponding to the residues 860 and 983 of the full length sequence of B. pertussis, B. hinzii or B parapertussis CyaA or corresponding to the residues located in positions 859 and 982 of the full length sequence of B. bronchiseptica CyaA. By “corresponding to”, it is meant that the residue(s) which is (are) post-translationally modified in the CyaA-derived protein or chimeric protein of the invention is (are) the one(s) the position of which matches the lysines 860 and 983 in the sequence of CyaA of B. pertussis, B. hinzii or B parapertussis CyaA (SEQ ID NO:2, 4 and 6 respectively) or the lysines 859 and 982 in the sequence of B. bronchiseptica CyaA (SEQ ID NO:8). The identification of these lysine residues in the proteins of the invention can be carried out by the person skilled in the art, by aligning and comparing the sequence of the proteins of the invention with the sequence as defined in SEQ ID NO:2, 4, 6 or 8.

[0143] The process of palmitoylation is mediated by the cyaC gene of a Bordetella species, preferably of the Bordetella pertussis CyaC coding sequence, the natural sequence of which is set forth in SEQ ID NO:21. A version of the CyaC coding sequence, optimized for production in E. coli, is set forth in SEQ ID NO:22. This (these) post translational modification(s) may be obtained by co-expression of the polynucleotide encoding CyaA protein, the polynucleotide encoding the CyaA-derived protein of the invention or the polynucleotide encoding the chimeric protein of the invention, and of the cyaC gene.

[0144] In a particular embodiment, the polynucleotide construct of the invention expressing the CyaA and CyaC proteins comprises from 5′ end to 3′ end, the cyaA polynucleotide or gene, advantageously consisting of an optimized sequence for expression in a determined host cell, e.g. E. Coli and the cyaC polynucleotide or gene, advantageously consisting of an optimized sequence for expression in a determined host cell, e.g. E. Co/i. This order of the insertion of the polynucleotides in the construct favours the expression of the CyaA and CyaC proteins in respective quantities and conformation suitable for increasing efficiency of expression of post translational modified version of CyaA.

[0145] In a particular embodiment of the invention, except for the deletion of the fragment [whose first amino acid residue is located from residue 184 to residue 228 of SEQ ID NO: 2, 4, 6 or 8 respectively, and whose last amino acid residue is located from residue 320 to residue 386 of SEQ ID NO: 2, 4, 6 or 8 respectively] carried out in the wild type Bordetella CyaA protein disclosed herein, the CyaA-derived protein of the invention or the CyaA part of the chimeric protein does not undergo any other variation (addition, deletion and/or substitution) as compared to SEQ ID NO:2, 4, 6 or 8.

[0146] Interestingly, the CyaA derived protein as well as the chimeric protein of the invention are non cytotoxic, i.e., their enzymatic activity has been inactivated following the deletion of the fragment whose first amino acid residue is located from residue 184 to residue 228 of SEQ ID NO: 2, 4, 6 or 8 respectively, and whose last amino acid residue is located from residue 320 to residue 386 of SEQ ID NO: 2, 4, 6 or 8 respectively. Therefore, in a particular embodiment, no insertion, deletion or substitution has been carried out. In particular, when the residues 188 and 189 of CyaA are still present in the proteins of the invention, no dipeptide (such as the dipeptide LQ or GS) is inserted between the residues 188 and 189.

[0147] The invention also concerns a chimeric protein which is encoded by a polynucleotide of the invention, expressed from a vector of the invention or produced by a cell culture of the invention.

[0148] A chimeric protein of the invention comprises or consists of, from N-terminal to C-terminal, (a) a fragment of the Bordetella pertussis CyaA protein as set forth in SEQ ID NO: 2, the sequence of said fragment beginning at the first residue of SEQ ID NO:2 and ending at a residue located from position 183 to position 227 of SEQ ID NO:2 or a variant with at least 95% similarity with this fragment, (b) a heterologous polypeptide, and (c) a fragment of the Bordetella pertussis CyaA protein as set forth in SEQ ID NO: 2, the sequence of said fragment beginning at a residue located from position 321 to position 387 of SEQ ID NO:2 and ending at the last residue of SEQ ID NO:2 or a variant with at least 95% similarity with this fragment.

[0149] The definitions described above for the CyaA-derived protein, regarding the fragment of the Bordetella pertussis CyaA protein as set forth in SEQ ID NO: 2, the sequence of said fragment beginning with the first residue of SEQ ID NO:2 and ending with a residue located from position 183 to position 227 of SEQ ID NO:2, and regarding the fragment of the Bordetella pertussis CyaA protein as set forth in SEQ ID NO: 2, the sequence of said fragment beginning with a residue located from position 321 to position 387 of SEQ ID NO:2 and ending with the last residue of SEQ ID NO:2, apply identically to these fragments in the context of the polynucleotide encoding a chimeric protein.

[0150] The definitions described above regarding variants with at least 95% apply identically to the fragments described in the context of a chimeric protein.

[0151] Thus, the invention is also directed to a chimeric protein comprising or consisting of:

[0152] 1) from N-terminal to C-terminal, (a) a fragment consisting of residues 1 to 227 of SEQ ID NO:2, 4 or 6, (b) a heterologous polypeptide and (c) a fragment consisting of residues 321 to 1706 of SEQ ID NO:2, 4 or 6;

[0153] 2) from N-terminal to C-terminal, (a) a fragment consisting of residues 1 to 227 of SEQ ID NO:8, (b) a heterologous polypeptide and (c) a fragment consisting of residues 321 to 1705 of SEQ ID NO:8;

[0154] 3) from N-terminal to C-terminal, (a) a fragment consisting of residues 1 to 183 of SEQ ID NO:2, 4 or 6, (b) a heterologous polypeptide and (c) a fragment consisting of residues 387 to 1706 of SEQ ID NO:2, 4 or 6; and

[0155] 4) from N-terminal to C-terminal, (a) a fragment consisting of residues 1 to 183 of SEQ ID NO:8, (b) a heterologous polypeptide and (c) a fragment consisting of residues 387 to 1705 of SEQ ID NO:8.

[0156] In a particular embodiment of chimeric proteins as defined herein, the fragment of (a) is fused to the heterologous polypeptide of (b) which is itself fused to the fragment of (c).

[0157] By “chimeric”, it is meant that the protein comprises or consists of, as defined herein, of fragments originating from a Bordetella CyaA, and one polypeptide which does not originate from a Bordetella CyaA. Therefore, said polypeptide is said heterologous, i.e., its overall sequence is not identical to a part of a Bordetella CyaA, in particular, to a part of a CyaA as set forth in SEQ ID NO:2, 4, 6 or 8; in a particular embodiment, the overall sequence of this heterologous polypeptide is not similar to a part of a Bordetella CyaA, in particular to a part of a CyaA as set forth in SEQ ID NO:2, 4, 6 or 8, i.e., its sequence has a similarity which is less than 80%, less than 70%, less than 60%, less than 50%, less than 40%, less than 30% or less than 20% with a part of a Bordetella CyaA, in particular with a part of a CyaA protein as set forth in SEQ ID NO:2, 4, 6 or 8, said similarity being calculated for this definition by comparing the sequence of the heterologous polypeptide and the one of the part of a Bordetella CyaA at equivalent size (the heterologous polypeptide and the part of a Bordetella CyaA having the same size). In a particular embodiment, the sequence of the heterologous peptide and the sequence of the portions (or fragment) originating from Bordetella CyaA as defined herein, do not share identity (100% similarity) over more than 7 consecutive amino acid residues.

[0158] In a particular embodiment, the heterologous polypeptide has a size ranging from 9 to 500 amino acid residues, in particular 9 to 400 residues, 9 to 300 residues, 9 to 200 residues, 9 to 100 residues, 20 to 500 residues, 20 to 400 residues, 20 to 300 residues, 20 to 200 residues, 20 to 100 residues, 50 to 500 residues 50 to 400 residues, 50 to 300 residues, 50 to 200 residues, 50 to 100 residues, 100 to 500 residues, 100 to 400 residues, 100 to 300 residues or 100 to 200. The size of the polynucleotide encoding the heterologous polypeptide ranges from 27 to 1500 nucleotides, in particular 27 to 1200 nucleotides, 27 to 900 nucleotides, 27 to 600 nucleotides, 27 to 300 nucleotides, 60 to 1500 nucleotides, 60 to 1200 nucleotides, 60 to 900 nucleotides, 60 to 600 nucleotides, 60 to 300 nucleotides, 150 to 1500 nucleotides 150 to 1200 nucleotides, 150 to 900 nucleotides, 150 to 600 nucleotides, 150 to 300 nucleotides, 300 to 1500 nucleotides, 300 to 1200 nucleotides, 300 to 900 nucleotides or 300 to 600, provided that the size (number of nucleotides) of the polynucleotide is a multiple of 3.

[0159] In a particular embodiment, the heterologous polypeptide, preferably in combination with the size ranges defined above, has an electrostatic charge that is negative, i.e., the heterologous polypeptide is acidic. In another embodiment, a fragment of the heterologous polypeptide has an electrostatic charge that is negative, i.e., this fragment of said heterologous polypeptide is acidic. A fragment of heterologous polypeptide is defined has a concatenation of consecutive amino acid residues, the size of which is from 10% to 40%, preferably 15% to 30%, of the size of the entire heterologous polypeptide.

[0160] In particular, the electrostatic charge is defined as the number of lysine and arginine residues minus the number of aspartic acid and glutamic acid residues contained in the heterologous polypeptide. In an embodiment, the electrostatic charge of the heterologous polypeptide is equal to −1 or is less than −1, and in particular is equal to or is less than −2, −3, −4, −5, −10, −15, −20, −30, −40, −45 or −50. In a particular embodiment, preferably in combination with one of the values of the previous sentence, the electrostatic charge of the heterologous polypeptide is not less than −55, −60, −70 or −80. In other words, the electrostatic charge of the heterologous polypeptide is in the range from −55 to −1, −50 to −2 or −40 to −3. As a comparison, the classical OVA epitope (SIINFEKL) has an electrostatic charge of 0.

[0161] Examples of several heterologous polypeptides, tested within chimeric proteins of the invention, are reported herein:
[0162] peptide 216 (SEQ ID NO:34), tested in chimeric proteins Btpr_{—}114 and Btpr_{—}116, has an electrostatic charge of −16;
[0163] peptide 217 (SEQ ID NO:36), tested in chimeric protein Btpr_{—}115 and Btpr_{—}117, has an electrostatic charge of −37;
[0164] peptide 233 (SEQ ID NO:38), tested in chimeric protein Btpr_{—}143 and Btpr_{—}144, has an electrostatic charge of −13;
[0165] peptide 234 (SEQ ID NO:40), tested in chimeric protein Btpr_{—}145 and Btpr-146, has an electrostatic charge of −38;
[0166] peptide 326 (SEQ ID NO:42), tested in chimeric protein Btpr_{—}161 and Btpr_{—}169, has an electrostatic charge of −11;
[0167] peptide 327 (SEQ ID NO:46), tested in chimeric protein Btpr_{—}162 and Btpr_{—}170, has an electrostatic charge of −10;
[0168] peptide 328 (SEQ ID NO:50), tested in chimeric protein Btpr_{—}163 and Btpr_{—}171, has an electrostatic charge of −18;
[0169] peptide 329 (SEQ ID NO:54), tested in chimeric protein Btpr_{—}164 and Btpr-172, has an electrostatic charge of −19;
[0170] peptide 330 (SEQ ID NO:44), tested in chimeric protein Btpr_{—}165 and Btpr_{—}173, has an electrostatic charge of −30;
[0171] peptide 331 (SEQ ID NO:48), tested in chimeric protein Btpr_{—}166 and Btpr_{—}174, has an electrostatic charge of −30;
[0172] peptide 332 (SEQ ID NO:52), tested in chimeric protein Btpr_{—}167 and Btpr_{—}175, has an electrostatic charge of −45; and
[0173] peptide 333 (SEQ ID NO:56), tested in chimeric protein Btpr_{—}168 and Btpr_{—}176, has an electrostatic charge of −46.

[0174] In a particular embodiment, said heterologous polypeptide comprises or consists of one or several antigen(s), each antigen comprising one or several epitope(s) as defined herein. Within the present invention, an antigen is defined as a polypeptide which is able to elicit an immune response, in particular a T cell immune response, against one or several epitopes contained in this polypeptide (immunogenic polypeptide). An antigen is either a full-length antigenic polypeptide of cellular or viral origin, a fragment of this full-length antigenic polypeptide able to elicit an immune response, in particular a T cell immune response, against an antigenic determinant contained in this fragment, or a synthetic, non-natural polypeptide which carries epitope(s) consisting of several parts of the antigenic polypeptide fused together or a synthetic, non-natural polypeptide consisting of one or several part(s) of several antigenic polypeptides fused together, provided that the synthetic polypeptide is able to elicit a T cell immune response, against an antigenic determinant contained in this synthetic polypeptide.

[0175] Thus, said heterologous polypeptide bears, comprises or consists of at least one epitope(s), preferably at least one CD8⁺ epitope(s) and/or at least one CD4⁺ epitope(s). By “at least”, it is meant one or a plurality of epitopes. An epitope is defined herein as any amino acid sequence involved in the elicitation or induction of a cell-mediated immune response, especially a T cell immune response, and is either linear or conformational. Accordingly, epitopes described herein include those which are processed by APC (Antigen Presenting Cells) in a host, especially T epitopes recognized in association with class I MHC (Major Histocompatibility Complex) molecules, such as epitopes which target cells are CD8⁺ T lymphocytes, or T epitopes recognized in association with class II MHC molecules, such as those which target cells are CD4⁺ T lymphocytes. Epitopes within the present invention have preferably a size ranging from 9 to 17, preferably 9 to 12, residues. Epitopes described herein include also B epitope(s) involved in humoral response.

[0176] A particular heterologous polypeptide comprising several antigens with various origins has been designed by the inventors. This heterologous polypeptide bears antigens which include murine and human MHC class I (CD8 response) and MHC class II (CD4 response) restricted T-cell epitopes: GFP11, MOG₃₅₋₅₅, OVA₂₅₇₋₂₆₄, IE₁₉₁₋₁₁₀, CLA4, HA₅₁₂₋₅₂₀, OVA₃₂₃₋₃₃₉, MELAN-A₂₆₋₃₅, HA₃₀₇₋₃₁₉, LCMV GP₃₃₋₄₁, MAGEA3₁₁₁₋₁₈₀, MAGEA3₂₄₄₋₂₈₅, fragment of HPV16E7 and fragment of HPV18E7. The amino acid sequence of this antigen is as set forth in SEQ ID NO:24, and is part of the present invention.

[0177] In a particular embodiment, said heterologous polypeptide comprises or consists of at least one antigen(s) or at least one epitope(s), said at least one antigen(s) or at least one epitope(s) being of viral origin. Thus, said at least one antigen(s) or at least one epitope(s) originates from HIV, HBV, HCV, adenoviruses, EBV, herpes virus, HTLV.1 virus and CMV. In particular embodiment, said at least one antigen(s) or at least one epitope(s) originates from HPV. In a particular embodiment, said heterologous polypeptide, at least one antigen(s) or at least one epitope(s) does not originate from HPV. In a particular embodiment, when the polypeptide comprises or consists of more than one epitope or more than one antigen, these epitopes or antigens originate from the same Order, the same Group, the same Family, the same Subfamily, the same Genus or the same species and/or originates from different Orders, different Groups, different Families, different Subfamilies, different Genus or different species.

[0178] In a particular embodiment, said heterologous polypeptide comprises or consists of at least one antigen(s) or at least one epitope(s), said at least one antigen(s) or at least one epitope(s) being of cellular origin. Thus, said at least one antigen(s) or at least one epitope(s) originates from a prokaryote or eukaryote cell.

[0179] In a embodiment, said at least one antigen(s) or at least one epitope(s) originates from bacteria, fungus or a parasite, such as, but not limited to, Chlamydia, Plasmodium, Candida, Leishmania or Mycobacterium tuberculosis. In a particular embodiment, said at least one antigen(s) or at least one epitope(s) does not originate from Bordetella strain. In another particular embodiment, said at least one antigen(s) or at least one epitope(s) originates from an antigen of Bordetella strain which is not CyaA. In a particular embodiment, when the polypeptide comprises or consists of more than one epitope or more than one antigen, these epitopes or antigens originate from the same bacteria, the same fungus or the same parasite. In another embodiment, when the polypeptide comprises or consists of more than one epitope or more than one antigen, these epitopes or antigens originate from different bacteria, different fungus or different parasite.

[0180] In another embodiment, said at least one antigen(s) or at least one epitope(s) originates from mammalian cell. In a particular embodiment, said at least one antigen(s) or at least one epitope(s) is from a tumour antigen, i.e., a peptide expressed by tumour or by cancerous cells, the tumour being self or induced by a pathogen; in a particular embodiment, the tumour antigen is self, in particular of human origin. The term “tumour antigen” encompasses the following groups of tumour antigens, and the heterologous polypeptide contained in the chimeric protein of the invention may be chosen in at least one of the following groups: (a) oncofetal tumour antigens, (b) oncoviral tumour antigens, (c) overexpressed/accumulated tumour antigens, expressed in a wide variety of normal tissues and overexpressed in tumours, (d) shared tumour-specific antigens or cancer-Testis antigens, expressed in many tumours but not in normal tissues (including BAGE family, GAGE family, MAGE family, SAGE family and XAGE family), (e) lineage-restricted tumour antigens, (f) mutated tumour antigens, resulting from point mutations in genes that are ubiquitously expressed; and (g) differentiation tumour antigens, expressed in the normal tissue of origin of the tumours but which are not tumour-specific.

[0181] When a heterologous polypeptide of the invention comprises several antigens, these antigens are either fused, are separated by peptide linkers or at least two of said antigens are fused whereas at least two of said antigens are separated by a linker. In a particular embodiment, said peptide linker has a size ranging from 2 to 10 residues. The linkers may be added to separate antigens and/or to improve immune response.

[0182] In a particular embodiment, said heterologous polypeptide comprises or consists of at least one antigen(s) or at least one epitope(s), said at least one antigen(s) or at least one epitope(s) originates from HPV. In a particular embodiment, said heterologous polypeptide comprises or consists of 2, 3, 4, 5, 6, 7, 8, 9 or 10 antigens originating from HPV. In a preferred embodiment, said heterologous polypeptide comprises at least 3 HPV antigens, each HPV antigen originating from a different HPV type. In a particular embodiment, said HPV antigen(s) comprises or consists of at least one epitope(s), preferably at least one CD8⁺ epitope(s) and/or at least one CD4⁺ epitope(s).

[0183] Thus, the invention is directed to a chimeric protein comprising or consisting of, from N-terminal to C-terminal:

[0184] (a) a fragment of the Bordetella pertussis CyaA protein as set forth in SEQ ID NO: 2, the sequence of said fragment beginning with the first residue of SEQ ID NO:2 and ending with a residue located from position 183 to position 227 of SEQ ID NO:2 or a variant with at least 95% similarity with this fragment;

[0185] (b) a heterologous polypeptide comprising at least 3 HPV antigens, each HPV antigen originating from a different HPV type; and

[0186] (c) a fragment of the Bordetella pertussis CyaA protein as set forth in SEQ ID NO: 2, the sequence of said fragment beginning with a residue located from position 321 to position 387 of SEQ ID NO:2 and ending with the last residue of SEQ ID NO:2 or a variant with at least 95% similarity with this fragment.

[0187] The definitions described above for the CyaA-derived protein, regarding the fragment of the Bordetella pertussis CyaA protein as set forth in SEQ ID NO: 2, the sequence of said fragment beginning with the first residue of SEQ ID NO:2 and ending with a residue located from position 183 to position 227 of SEQ ID NO:2, and regarding the fragment of the Bordetella pertussis CyaA protein as set forth in SEQ ID NO: 2, the sequence of said fragment beginning with a residue located from position 321 to position 387 of SEQ ID NO:2 and ending with the last residue of SEQ ID NO:2, apply identically to these fragments in the context of the polynucleotide encoding a chimeric protein.

[0188] The definitions described above regarding variants with at least 95% apply identically to the fragments described in the context of a chimeric protein. Similarly the definitions relating to the heterologous polypeptide apply to define the polynucleotide encoding said heterologous polypeptide.

[0189] In a particular embodiment, the chimeric protein of the invention comprises or consists of,

[0190] 1) from N-terminal to C-terminal, (a) a fragment consisting of residues 1 to 227 of SEQ ID NO:2, 4 or 6, (b) a heterologous polypeptide comprising at least 3 HPV antigens, each HPV antigen originating from a different HPV type; and (c) a fragment consisting of residues 321 to 1706 of SEQ ID NO:2, 4 or 6;

[0191] 2) from N-terminal to C-terminal, (a) a fragment consisting of residues 1 to 227 of SEQ ID NO:8, (b) a heterologous polypeptide comprising at least 3 HPV antigens, each HPV antigen originating from a different HPV type; and (c) a fragment consisting of residues 321 to 1705 of SEQ ID NO:8;

[0192] 3) from N-terminal to C-terminal, (a) a fragment consisting of residues 1 to 183 of SEQ ID NO:2, 4 or 6, (b) a heterologous polypeptide comprising at least 3 HPV antigens, each HPV antigen originating from a different HPV type; and (c) a fragment consisting of residues 387 to 1706 of SEQ ID NO:2, 4 or 6;

[0193] 4) from N-terminal to C-terminal, (a) a fragment consisting of residues 1 to 183 of SEQ ID NO:8, (b) a heterologous polypeptide comprising at least 3 HPV antigens, each HPV antigen originating from a different HPV type; and (c) a fragment consisting of residues 387 to 1705 of SEQ ID NO:8;

[0194] 5) from N-terminal to C-terminal, (a) a fragment consisting of residues 1 to 227 of SEQ ID NO:2, 4 or 6, (b) a heterologous polypeptide comprising at least 3 HPV antigens, each HPV antigen originating from a different HPV type; and (c) a fragment consisting of residues 387 to 1706 of SEQ ID NO:2, 4 or 6;

[0195] 6) from N-terminal to C-terminal, (a) a fragment consisting of residues 1 to 227 of SEQ ID NO:8, (b) a heterologous polypeptide comprising at least 3 HPV antigens, each HPV antigen originating from a different HPV type; and (c) a fragment consisting of residues 387 to 1705 of SEQ ID NO:8;

[0196] 7) from N-terminal to C-terminal, (a) a fragment consisting of residues 1 to 183 of SEQ ID NO:2, 4 or 6, (b) a heterologous polypeptide comprising at least 3 HPV antigens, each HPV antigen originating from a different HPV type; and (c) a fragment consisting of residues 321 to 1706 of SEQ ID NO:2, 4 or 6; and

[0197] 8) from N-terminal to C-terminal, (a) a fragment consisting of residues 1 to 183 of SEQ ID NO:8, (b) a heterologous polypeptide comprising at least 3 HPV antigens, each HPV antigen originating from a different HPV type; and (c) a fragment consisting of residues 321 to 1705 of SEQ ID NO:8.

[0198] The expression “HPV type” encompasses any HPV type, especially HPV types selected among the genus Alpha-papillomavirus, Beta-papillomavirus, Gamma-papillomavirus, Delta-papillomavirus, Epsilon-papillomavirus, Zeta-papillomavirus, Eta-papillomavirus, Theta-papillomavirus, Iota-papillomavirus, Kappa-papillomavirus, Lambda-papillomavirus, Mu-papillomavirus, Nu-papillomavirus, Xi-papillomavirus, Omikron-papillomavirus and Pi-papillomavirus. In a particular embodiment, papillomaviruses having a human tropism, such as types from genus Alpha-papillomavirus, Beta-papillomavirus, Gamma-papillomavirus, Mu-papillomavirus or Nu-papillomavirus, are preferred. In a particular embodiment, the heterologous polypeptide comprises or consists of antigens from HPV types of the Alpha-papillomavirus genus, especially a type from HPV species 7 and 9 of the Alpha-papillomavirus genus [17]. Thus, the heterologous polypeptide comprises or consists of antigens from HPV highly oncogenic type species, such as HPV16, HPV18, HPV31, HPV33, HPV35, HPV45, HPV52 or HPV58.

[0199] In a particular embodiment of a chimeric protein comprising HPV antigen(s) or epitope(s), said antigen(s), contained in the heterologous polypeptide, is or are selected from the E1, E2, E4, E5, E6 and E7 proteins of HPV or any antigenic fragment thereof.

[0200] In a particular embodiment, said antigen, contained in the heterologous polypeptide, is the E7 protein of a HPV type or said antigens, contained in the heterologous polypeptide, are the E7 proteins of different HPV types, or any antigenic fragment of this E7 protein (also called E7 fragment). In a preferred embodiment, the E7 protein or fragment thereof is from the HPV16 type (SEQ ID NO:25), the HPV18 type (SEQ ID NO:26), the HPV31 type (SEQ ID NO:27), the HPV33 type (SEQ ID NO:28), the HPV45 type (SEQ ID NO:29), the HPV52 type (SEQ ID NO:30) or the HPV58 type (SEQ ID NO:32). To remove a naturally human auto-immune epitope identified by the inventors in the E7 protein of the HPV52 type (as set forth in SEQ ID NO: 30), the amino acid residue in positions 84 and 86 have been substituted (M->L at position 84 and L->M at position 86); this modified sequence of the E7 protein of the HPV52 type is as set forth in SEQ ID NO:31 and is as such part of the invention.

[0201] In a particular embodiment, said heterologous polypeptide comprises or consists of at least 3 fragments (antigenic fragments) of an E7 protein of a HPV type, at least 3 of these fragments originating from E7 proteins of different HPV types. In this embodiment, “at least 3 fragments” means 3, 4, 5, 6, 7, 8, 9 or 10 fragments, provided that among these 3, 4, 5, 6, 7, 8, 9 or 10 fragments, at least 3, originate from different HPV types. In a preferred embodiment, said heterologous polypeptide comprises or consists of 6 E7 fragments, 3 of which originate from three different HPV types. In another preferred embodiment, said heterologous polypeptide comprises or consists of 8 E7 fragments, 4 of which originate from four different HPV types.

[0202] In a particular embodiment, all the E7 fragments originate from different HPV types. In another embodiment, only some E7 fragments (at least 3) originate from different HPV types, the other E7 fragments either all originate from one of said different HPV types, originate from two of said different HPV types, originate from three of said different HPV types, originate from four of said different HPV types or originate from five of said different HPV types. In a particular embodiment, the heterologous polypeptide comprises or consists of at least 4 fragments of the E7 protein, at least 3 of these E7 fragments originating from E7 proteins of different HPV types, and at least 2 of these E7 fragments originating from the same E7 protein of a HPV type (one E7 fragment being both in the group of the E7 fragment of different HPV types and in the group of the E7 fragment of the same HPV type). As a non-limitative example, for a heterologous polypeptide with 6 E7 fragments of HPV types, the following combinations may be found: a) 1 E7 fragment from a first HPV type, 1 E7 fragment from a second HPV type, and 4 E7 fragment from a third HPV type; b) 1 E7 fragment from a first HPV type, 2 E7 fragment from a second HPV type, and 3 E7 fragment from a third HPV type; and c) 2 E7 fragment from a first HPV type, 2 E7 fragment from a second HPV type, and 2 E7 fragment from a third HPV type.

[0203] In a particular embodiment, said E7 fragment of HPV type consists of the N-terminal-part of the E7 protein or of the C-terminal-part of the E7 protein.

[0204] By “N-terminal part of E7”, it is meant a fragment the sequence of which is at least the first 25%, the first 30%, the first 35%, the first 40% of the E7 protein and is at most the first 50% of the length in amino acid residues of the E7 protein starting from the first N-terminal amino acid residue. Accordingly by “the first 25%”, it is meant a polypeptide the sequence of which begins at residue 1 of the E7 protein and ends at the residue corresponding to 25% of the size of the full-length E7 protein. In a particular embodiment, a fragment consisting of the N-terminal-part of the E7 protein consists of a sequence which ranges from the first 28% to the first 31% of the E7 protein. In another embodiment, a fragment consisting of the N-terminal-part of the E7 protein consists of a sequence which ranges from the first 31% to the first 41% of the E7 protein. Particular embodiments are a fragment consisting of residues 1 to 29 of SEQ ID NO:25, a fragment consisting of residues 1 to 31 of SEQ ID NO:26, a fragment consisting of residues 1 to 28 of SEQ ID NO:27, a fragment consisting of residues 1 to 29 SEQ ID NO:28, a fragment consisting of residues 1 to 32 of SEQ ID NO:29, a fragment consisting of residues 1 to 29 of SEQ ID NO:31 or a fragment consisting of residues 1 to 29 of SEQ ID NO:32. Other embodiments are a fragment consisting of residues 1 to 34 of SEQ ID NO:25, a fragment consisting of residues 1 to 42 of SEQ ID NO:26, a fragment consisting of residues 1 to 32 of SEQ ID NO:27, a fragment consisting of residues 1 to 31 of SEQ ID NO:28, a fragment consisting of residues 1 to 37 of SEQ ID NO:29, a fragment consisting of residues 1 to 31 of SEQ ID NO:31 or a fragment consisting of residues 1 to 31 of SEQ ID NO:32.

[0205] By “C-terminal part of E7”, it is meant a fragment the sequence of which is at least the last 25%, the last 30%, the last 40%, the last 50%, the last 60 of the length in amino acid residues of the E7 protein starting from the last amino acid residue and is at most the last 70% or the last 80% of the E7 protein. By “the last 25%”, it is meant a polypeptide the sequence of which ends at the last residue of the E7 protein and begins at the residue corresponding to 25% of the size of the full-length E7 protein. In a particular embodiment, a fragment consisting of the C-terminal-part of the E7 protein consists of a sequence which ranges from the last 55% to the last 61% of the E7 protein. In another embodiment, a fragment consisting of the C-terminal-part of the E7 protein consists of a sequence which ranges from the last 60% to the last 70% of the E7 protein. Particular embodiments are a fragment consisting of residues 43 to 98 of SEQ ID NO:25, a fragment consisting of residues 43 to 105 of SEQ ID NO:26, a fragment consisting of residues 42 to 98 of SEQ ID NO:27, a fragment consisting of residues 43 to 97 SEQ ID NO:28, a fragment consisting of residues 44 to 106 of SEQ ID NO:29, a fragment consisting of residues 45 to 99 of SEQ ID NO:31 or a fragment consisting of residues 44 to 98 of SEQ ID NO:32. Other embodiments are a fragment consisting of residues 35 to 98 of SEQ ID NO:25, a fragment consisting of residues 43 to 105 of SEQ ID NO:26, a fragment consisting of residues 33 to 98 of SEQ ID NO:27, a fragment consisting of residues 32 to 97 of SEQ ID NO:28, a fragment consisting of residues 38 to 106 of SEQ ID NO:29, a fragment consisting of residues 32 to 99 of SEQ ID NO:31 or a fragment consisting of residues 32 to 98 of SEQ ID NO:32.

[0206] In a particular embodiment, said heterologous polypeptide comprises a N-terminal fragment and a C-terminal fragment as defined herein of the E7 protein of the same HPV type. In a particular embodiment, when said heterologous polypeptide comprises a N-terminal fragment and a C-terminal fragment of the E7 protein of the same HPV type (not fused), the sum of the size of the N-terminal-part and of the size of the C-terminal-part does not exceed the size of the full-length E7 protein.

[0207] In another embodiment, said heterologous polypeptide comprises a N-terminal fragment and a C-terminal fragment as defined herein of the E7 protein of a first HPV type, a N-terminal fragment and a C-terminal fragment as defined herein of the E7 protein of a second HPV type, a N-terminal fragment and a C-terminal fragment as defined herein of the E7 protein of a third HPV type and, optionally, a N-terminal fragment and a C-terminal fragment as defined herein of the E7 protein of a fourth HPV type. These N-terminal and C-terminal fragments may be respectively grouped in the polypeptides. Furthermore they may be inverted with respect to their position in the native E7 protein, the C-terminal fragments being located upstream from the N-terminal one.

[0208] Thus, a chimeric protein of the invention comprises a heterologous polypeptide which comprises or consists of, from N-terminal to C terminal, (i) the C-terminal part of the E7 protein of a first HPV type, the C-terminal part of the E7 protein of a second HPV type, the C-terminal part of the E7 protein of a third HPV type, optionally the C-terminal part of the E7 protein of a fourth HPV type, and (ii) the N-terminal part of the E7 protein of said first HPV type, the N-terminal part of the E7 protein of said second HPV type, the N-terminal part of the E7 protein of said third HPV type, and optionally the N-terminal part of the E7 protein of said fourth HPV type.

[0209] The term “optionally” in the above definition refers to the presence of the fourth valence of HPV. Accordingly, the chimeric protein comprises both C-terminal part and N-terminal part of E7 proteins of a first a second and a third HPV as defined above, and optionally C-terminal part and N-terminal part of a fourth E7 protein of a different HPV.

[0210] In a particular embodiment, the different E7 fragments are either fused or are separated by peptide linkers or at least two of the E7 fragments are fused whereas at least two of the E7 fragments are separated by a peptide linker. In a particular embodiment, said peptide linker has a size ranging from 2 to 10 residues. In a particular embodiment, said linker is the dipeptide AS. The linkers may be added to separate each fragment or some fragments, and/or to improve immune response. In a particular embodiment, a dipeptide AS is added immediately upstream to the C-terminal part of a E7 fragment of HPV. In a particular embodiment, a dipeptide AS is added immediately upstream of the C-terminal part of an E7 fragment of HPV18 type, and in particular only upstream of this fragment.

[0211] A particular chimeric protein of the invention comprises or consists of a heterologous polypeptide which consists of, from N-terminal to C-terminal, the C-terminal part of the E7 protein of a first HPV type, fused to the C-terminal part of the E7 protein of a second HPV type, fused to the C-terminal part of the E7 protein of a third HPV type, fused to the N-terminal part of the E7 protein of said first HPV type, fused to the N-terminal part of the E7 protein of said second HPV type, fused to the N-terminal part of the E7 protein of said third HPV type.

[0212] Another particular chimeric protein of the invention comprises or consists of a heterologous polypeptide which consists of, from N-terminal to C terminal, the C-terminal part of the E7 protein of a first HPV type, fused to the C-terminal part of the E7 protein of a second HPV type, fused to the C-terminal part of the E7 protein of a third HPV type, fused to the C-terminal part of the E7 protein of a fourth HPV type, fused to the N-terminal part of the E7 protein of said first HPV type, fused to the N-terminal part of the E7 protein of said second HPV type, fused to the N-terminal part of the E7 protein of said third HPV type, fused to the N-terminal part of the E7 protein of said fourth HPV type.

[0213] In the particular embodiment of a chimeric protein described herein, said first, second and third HPV types are HPV16, HVP18 and HPV45 types. In a particular embodiment, said first, second and third HPV types are HPV16, HVP18 and HPV45 types, and an AS dipeptide is added immediately upstream of the C-terminal part of the E7 fragment of HPV18 type. In another embodiment, said first, second and third HPV types are HPV31, HPV52 and HPV58 types. In another embodiment, said first, second and third HPV types are HPV31, HVP33 and HPV52 types. In another embodiment, said first, second, third and fourth HPV types are HPV31, HPV33, HPV52 and HPV58 types. In another embodiment, said first, second, third and fourth HPV types are HPV16, HVP18, HPV33 and HPV45 types.

[0214] In another embodiment, said first, second, third and fourth HPV types are HPV16, HVP18, HPV45 and HPV58 types. In another embodiment, said first, second, third and fourth HPV types are HPV16, HVP18, HPV33 and HPV45 types and an AS dipeptide is added immediately upstream of the C-terminal part of the E7 fragment of HPV18 type. In another embodiment, said first, second, third and fourth HPV types are HPV16, HVP18, HPV45 and HPV58 types, and an AS dipeptide is added immediately upstream of the C-terminal part of the E7 fragment of HPV18 type.

[0215] In a particular embodiment, the N-terminal-part of the E7 protein of a HPV type consists of a sequence which ranges from the first 28% to the first 31% of the E7 protein and the C-terminal-part of the E7 protein of said same HPV type consists of a sequence which ranges from the last 55% to the last 61% of the E7 protein. Examples of N-terminal-part/C-terminal-part pairs of the E7 protein of the same HPV type, whatever their arrangement within said heterologous polypeptide, and in particular according to the arrangement described herein, are as follows:

[0216] residues 1 to 29 of SEQ ID NO:25/residues 43 to 98 of SEQ ID NO:25;

[0217] residues 1 to 31 of SEQ ID NO:26/residues 43 to 105 of SEQ ID NO:26;

[0218] residues 1 to 28 of SEQ ID NO:27/residues 42 to 98 of SEQ ID NO:27;

[0219] residues 1 to 29 SEQ ID NO:28/residues 43 to 97 SEQ ID NO:28;

[0220] residues 1 to 32 of SEQ ID NO:29/residues 44 to 106 of SEQ ID NO:29;

[0221] residues 1 to 29 of SEQ ID NO:31/residues 45 to 99 of SEQ ID NO:31; and

[0222] residues 1 to 29 of SEQ ID NO:32/residues 44 to 98 of SEQ ID NO:32.

[0223] In another embodiment, the N-terminal-part of the E7 protein of a HPV type consists of a sequence which ranges from the first 31% to the first 41% of the E7 protein and the C-terminal-part of the E7 protein consists of a sequence which ranges from the last 60% to the last 70% of the E7 protein. In particular embodiment, the sum of the size of the N-terminal-part of the E7 protein and the size of the size of the C-terminal-part is at most 100% of the size of the E7 protein. In that case, the entire E7 protein (in two fragments), may be contained in the heterologous polypeptide. Examples of N-terminal-part/C-terminal-part pairs of the E7 protein of the same HPV type, whatever their arrangement within said heterologous polypeptide, and in particular according to the arrangement described herein, are as follows:

[0224] residues 1 to 34 of SEQ ID NO:25/residues 35 to 98 of SEQ ID NO:25;

[0225] residues 1 to 42 of SEQ ID NO:26/residues 43 to 105 of SEQ ID NO:26;

[0226] residues 1 to 32 of SEQ ID NO:27/residues 33 to 98 of SEQ ID NO:27;

[0227] residues 1 to 31 of SEQ ID NO:28/residues 32 to 97 of SEQ ID NO:28;

[0228] residues 1 to 37 of SEQ ID NO:29/residues 38 to 106 of SEQ ID NO:29;

[0229] residues 1 to 31 of SEQ ID NO:31/residues 32 to 99 of SEQ ID NO:31; and

[0230] residues 1 to 31 of SEQ ID NO:32/residues 32 to 98 of SEQ ID NO:32.

[0231] In a particular embodiment of a chimeric protein, when said first, second and third HPV types are HPV16, HVP18 and HPV45 types, the heterologous polypeptide consists either of the sequence as set forth in SEQ ID NO:34 (encoded by a polynucleotide as set forth in SEQ ID NO:33) or the sequence as set forth in SEQ ID NO:36 (encoded by a polynucleotide as set forth in SEQ ID NO:35).

[0232] In a particular embodiment of a chimeric protein, when said first, second and third HPV types are HPV31, HVP52 and HPV58 types, the heterologous polypeptide consists either of the sequence as set forth in SEQ ID NO42: (encoded by a polynucleotide as set forth in SEQ ID NO:41) or the sequence as set forth in SEQ ID NO:44 (encoded by a polynucleotide as set forth in SEQ ID NO:43).

[0233] In a particular embodiment of a chimeric protein, when said first, second and third HPV types are HPV31, HVP33 and HPV52 types, the heterologous polypeptide consists either of the sequence as set forth in SEQ ID NO:46 (encoded by a polynucleotide as set forth in SEQ ID NO:45) or the sequence as set forth in SEQ ID NO:48 (encoded by a polynucleotide as set forth in SEQ ID NO:47).

[0234] In a particular embodiment of a chimeric protein, when said first, second, third and fourth HPV types are HPV31, HPV33, HPV52 and HPV58 types, the heterologous polypeptide consists either of the sequence as set forth in SEQ ID NO:38 (encoded by a polynucleotide as set forth in SEQ ID NO:37) or the sequence as set forth in SEQ ID NO:40 (encoded by a polynucleotide as set forth in SEQ ID NO:39).

[0235] In a particular embodiment of a chimeric protein, when said first, second, third and fourth HPV types are HPV16, HVP18, HPV33 and HPV45 types, the heterologous polypeptide consists either of the sequence as set forth in SEQ ID NO:50 (encoded by a polynucleotide as set forth in SEQ ID NO:49) or the sequence as set forth in SEQ ID NO:52 (encoded by a polynucleotide as set forth in SEQ ID NO:51).

[0236] In a particular embodiment of a chimeric protein, when said first, second, third and fourth HPV types are HPV16, HVP18, HPV45 and HPV58 types, the heterologous polypeptide consists either of the sequence as set forth in SEQ ID NO:54 (encoded by a polynucleotide as set forth in SEQ ID NO:53) or the sequence as set forth in SEQ ID NO:56 (encoded by a polynucleotide as set forth in SEQ ID NO:55).

[0237] The invention also concerns a polypeptide, comprising or consisting of, from N-terminal to C terminal, the C-terminal part of the E7 protein of a first HPV type, the C-terminal part of the E7 protein of a second HPV type, the C-terminal part of the E7 protein of a third HPV type, optionally the C-terminal part of the E7 protein of a fourth HPV type, the N-terminal part of the E7 protein of said first HPV type, the N-terminal part of the E7 protein of said second HPV type, the N-terminal part of the E7 protein of said third HPV type, and optionally the N-terminal part of the E7 protein of said fourth HPV type. Definitions provided herein for a heterologous polypeptide contained in a chimeric protein of the invention apply identically to the polypeptide as such, in particular regarding the definitions of the N-terminal part of the E7 protein of a HPV type, of the C-terminal part of the E7 protein of a HPV type, the optional presence of a linker, in particular the AS dipeptide, the nature of the HPV types, the particular fragments of the E7 proteins from SEQ ID NO:25, 26, 27, 28, 29, 31 and 32. Definitions provided herein for a composition comprising chimeric protein(s) of the invention apply identically to the polypeptides as such, in particular regarding the general or specific combinations of said first, second, third, fourth, fifth and sixth HPV types and, when applicable, of said seventh HPV type.

[0238] In a particular embodiment, said polypeptide consists of a sequence as set forth in SEQ ID NO: 34, 36, 38, 40, 42, 44, 46, 48, 50, 52, 54 or 56. The invention is also directed to the polynucleotides encoding these polypeptides, in particular the polynucleotides as set forth in SEQ ID NO: 33, 35, 37, 39, 41, 43, 45, 47, 49, 51, 53 and 55, as well as a vector comprising these polynucleotides, and a cell or cell culture comprising these polynucleotide or a vector comprising these polynucleotides; all as defined herein.

[0239] Despite its size (more than 200 residues), its complexity (presence of several cysteine residues) and its negative electrostatic charge, said polypeptide has been surprisingly shown to be efficiently translocated into the cytosol of antigen presenting cells, enabling to obtain strong and large T-cell immune responses.

[0240] In a particular embodiment, the invention is directed to a chimeric protein of the invention which comprises or consists of a sequence as set forth in SEQ ID NO:58 or in SEQ ID NO:61. These chimeric proteins are respectively encoded by a polynucleotide the sequence of which is as set forth in SEQ ID NO:57 or in SEQ ID NO:60. In a particular embodiment, the chimeric protein of SEQ ID NO:58 or SEQ ID NO:61 is expressed from the plasmids whose sequence is SEQ ID NO:59 or SEQ ID NO:62 respectively.

[0241] In a particular embodiment, the invention is also directed to a chimeric protein of the invention comprises or consists of a sequence as set forth in SEQ ID NO:64 or in SEQ ID NO:67. These chimeric proteins are respectively encoded by a polynucleotide the sequence of which is as set forth in SEQ ID NO:63 or in SEQ ID NO:66. In a particular embodiment, the chimeric protein of SEQ ID NO:64 or SEQ ID NO:67 are expressed from the plasmids whose sequence is SEQ ID NO:65 and SEQ ID NO:68 respectively.

[0242] Thus, any chimeric protein of the invention comprising a heterologous polypeptide comprising or consisting of at least one antigen(s) or at least one epitope(s) originating from HPV, as described herein, may be expressed, using the plasmids of SEQ ID NO:59, SEQ ID NO:62, SEQ ID NO:65 and SEQ ID NO:68, as expression vectors. In this order, the polynucleotide contained between nucleotides 904 and 1731 of SEQ ID NO:59 is removed, and replaced by a polynucleotide encoding a heterologous polypeptide of the invention, enabling to express a chimeric protein of the invention comprising this heterologous polypeptide. Similarly, the polynucleotide contained between nucleotides 772 and 1599 of SEQ ID NO:62 is removed, and replaced by a polynucleotide encoding a heterologous polypeptide of the invention, enabling to express a chimeric protein of the invention comprising this heterologous polypeptide. Similarly, the polynucleotide contained between nucleotides 904 and 1836 of SEQ ID NO:65 is removed, and replaced by a polynucleotide encoding a heterologous polypeptide of the invention, enabling to express a chimeric protein of the invention comprising this heterologous polypeptide. Similarly, the polynucleotide contained between nucleotides 772 and 1704 of SEQ ID NO:68 is removed, and replaced by a polynucleotide encoding a heterologous polypeptide of the invention, enabling to express a chimeric protein of the invention comprising this heterologous polypeptide.

[0243] In a particular embodiment of the invention, the polynucleotide contained between nucleotides 904 and 1731 of SEQ ID NO:59 is removed, and replaced by a polynucleotide encoding a heterologous polypeptide of the invention derived from a unique HPV E7 protein this polynucleotide being selected among the polynucleotides encoding the polypeptides having respectively the sequence of SEQ ID NO:70, SEQ ID NO:71, SEQ ID NO:74, SEQ ID NO:73 and SEQ ID NO:72. Such constructs enable to express a monovalent chimeric protein of the invention comprising a heterologous polypeptide having SEQ ID NO:70, SEQ ID NO:71, SEQ ID NO:74, SEQ ID NO:73 or SEQ ID NO:72 and representing respectively HPV31 E7 deleted for its acidic region, HPV33 E7 deleted for its acidic region, HPV58 E7 deleted for its acidic region, HPV52 E7 deleted for its acidic region and HPV45 E7 deleted for its acidic region.

[0244] In a particular embodiment, of the invention, the polynucleotide contained between nucleotides 904 and 1731 of SEQ ID NO:59 is removed, and replaced by a polynucleotide encoding a heterologous polypeptide of the invention derived from a unique HPV E7 protein this polynucleotide being selected among the polynucleotides having respectively the sequence of SEQ ID NO:75, SEQ ID NO:76, SEQ ID NO:79, SEQ ID NO:78 and SEQ ID NO:77.

[0245] The invention is also directed to a composition comprising at least one, preferably one or two, chimeric protein(s) of the invention, in particular at least two, preferably two, different chimeric proteins of the invention,

[0246] In a particular embodiment, when the composition comprises more than one different, preferably 2 different, chimeric proteins, the sequences of the CyaA portions (or fragments) of said chimeric proteins are the same or are different, whereas the sequences of the heterologous polypeptides are different. In a particular embodiment, the different, preferably 2 different, chimeric proteins are selected from the different chimeric proteins as described herein. In a particular embodiment, the 2 different chimeric proteins are either:
[0247] 1) 2 chimeric proteins comprising or consisting of, from N-terminal to C-terminal, (a) a fragment consisting of residues 1 to 227 of SEQ ID NO:2 (b) a heterologous polypeptide comprising at least 3 HPV antigens, each HPV antigen originating from a different HPV type; and (c) a fragment consisting of residues 321 to 1706 of SEQ ID NO:2, provided that the heterologous polypeptides of these two chimeric proteins differ in their sequence and the HPV types; or
[0248] 2) 2 chimeric proteins comprising or consisting of, from N-terminal to C-terminal, (a) a fragment consisting of residues 1 to 183 of SEQ ID NO:2, (b) a heterologous polypeptide comprising at least 3 HPV antigens, each HPV antigen originating from a different HPV type; and (c) a fragment consisting of residues 387 to 1706 of SEQ ID NO:2, provided that the heterologous polypeptides of these two chimeric proteins differ in their sequence and the HPV types.

[0249] In another embodiment, the sequences of the CyaA portions (or fragments) of said different, preferably 2 different, chimeric proteins are different and the sequence of the heterologous polypeptide is different. In a particular embodiment, the different, preferably 2 different types of chimeric proteins are selected from the different, chimeric proteins as described herein. In a particular embodiment, at least one, preferably one, of the different, preferably 2 different, chimeric proteins comprise or consists of, from N-terminal to C-terminal, (a) a fragment consisting of residues 1 to 227 of SEQ ID NO:2 (b) a heterologous polypeptide comprising at least 3 HPV antigens, each HPV antigen originating from a different HPV type; and (c) a fragment consisting of residues 321 to 1706 of SEQ ID NO:2, and at least one, preferably one, of the different, preferably 2 different, chimeric proteins comprise or consists of, from N-terminal to C-terminal, (a) a fragment consisting of residues 1 to 183 of SEQ ID NO:2, (b) a heterologous polypeptide comprising at least 3 HPV antigens, each HPV antigen originating from a different HPV type, wherein said heterologous polypeptide differs in its sequence and HPV types from the heterologous polypeptide of the other at least one chimeric protein; and (c) a fragment consisting of residues 387 to 1706 of SEQ ID NO:2.

[0250] In a particular embodiment of a composition comprising more than one different, preferably 2 different types of chimeric proteins, the heterologous polypeptides are as defined herein. In a particular embodiment, each heterologous polypeptide comprises a N-terminal fragment and a C-terminal fragment as defined herein of the E7 protein of a first HPV type, a N-terminal fragment and a C-terminal fragment as defined herein of the E7 protein of a second HPV type, a N-terminal fragment and a C-terminal fragment as defined herein of the E7 protein of a third HPV type and, optionally, a N-terminal fragment and a C-terminal fragment as defined herein of the E7 protein of a fourth HPV type, wherein each heterologous polypeptide has a sequence which is different from the other(s) heterologous polypeptide(s).

[0251] In a particular embodiment, the composition comprising 2 different types of chimeric proteins, the heterologous polypeptide of the first type of chimeric protein comprising a N-terminal fragment and a C-terminal fragment as defined herein of the E7 protein of a first HPV type, a N-terminal fragment and a C-terminal fragment as defined herein of the E7 protein of a second HPV type and a N-terminal fragment and a C-terminal fragment as defined herein of the E7 protein of a third HPV type, and the heterologous polypeptide of the second type of chimeric protein comprising a N-terminal fragment and a C-terminal fragment as defined herein of the E7 protein of a fourth HPV type, a N-terminal fragment and a C-terminal fragment as defined herein of the E7 protein of a fifth HPV type and a N-terminal fragment and a C-terminal fragment as defined herein of the E7 protein of a sixth HPV type, wherein the first, second, third, fourth, fifth and sixth HPV types are different HPV types.

[0252] In a particular embodiment, the first, second, third, fourth, fifth and sixth HPV types are (a) chosen among HPV16, HPV18, HPV45, HPV31, HPV52 and HPV58 or (b) chosen among HPV16, HPV18 and HPV45, HPV31, HPV33 and HPV52.

[0253] In a particular embodiment, the first, second and third HPV types are HPV16, HPV18 and HPV45. In a particular embodiment, the heterologous polypeptide comprises or consists of the sequence as set forth in SEQ ID NO:34 or 36. In a particular embodiment, said chimeric protein comprises or consists of the sequence as set forth in SEQ ID NO: 58, 61, 64 or 67. To these particular embodiments, a fourth HPV subtype can be associated, which is chosen among HPV33 or HPV58,

[0254] In a particular embodiment, independently or in combination with the embodiment regarding the first, second and third HPV types, the fourth, fifth and sixth HPV types are HPV31, HPV52 and HPV58. In a particular embodiment, the heterologous polypeptide comprises or consists of the sequence as set forth in SEQ ID NO:42 or 44.

[0255] In a particular embodiment, independently or in combination with the embodiment regarding the first, second and third HPV types, the fourth, fifth and sixth HPV types are HPV31, HPV33 and HPV52. In a particular embodiment, the heterologous polypeptide comprises or consists of the sequence as set forth in SEQ ID NO:46 or 48. In a particular embodiment, said chimeric protein comprises or consists of the sequence as set forth in SEQ ID NO: 58, 61, 64 or 67, into which the sequence as set forth in SEQ ID NO: 34 or 36 has been replaced by the sequence as set forth in SEQ ID NO: 42, 44, 46 or 48

[0256] The invention relates in a particular embodiment, to the combination of the above recited antigens of the specified HPV subtypes, when these antigens are provided in the chimeric proteins in an order corresponding to above specified order of citation of the HPV subtypes or alternatively in any other order of presentation of the antigens in the chimeric proteins that would correspond to any combination of first, second, third, and optionally fourth HPV among those cited and in particular among the groups of HPV16, HPV18 and HPV45 or HPV31, HPV52 and HPV58 or HPV31, HPV33 and HPV52.

[0257] In a particular embodiment, the first, second, third, fourth, fifth and sixth HPV types are (a) HPV16, HPV18, HPV45, HPV31, HPV52 and HPV58 respectively or (b) HPV16, HPV18 and HPV45, HPV31, HPV33 and HPV52 respectively.

[0258] In a particular embodiment, the two different chimeric proteins comprise the antigens as disclosed herein of the HPV16, HPV18, HPV45 for the first chimeric protein and of the HPV31, HPV52, HPV58 for the second chimeric protein. In another particular embodiment, the two different chimeric proteins comprise the antigens as disclosed herein of the HPV16, HPV18, HPV45 for the first chimeric protein and of the HPV31, HPV33, HPV52 for the second chimeric protein. In a preferred embodiment, but not necessarily, the HPV antigens thus defined are inserted in the chimeric proteins in the specified order.

[0259] In a particular embodiment, the composition comprising 2 different types of chimeric proteins, the heterologous polypeptide of the first type of chimeric protein comprising a N-terminal fragment and a C-terminal fragment as defined herein of the E7 protein of a first HPV type, a N-terminal fragment and a C-terminal fragment as defined herein of the E7 protein of a second HPV type and a N-terminal fragment, a C-terminal fragment as defined herein of the E7 protein of a third HPV type and a N-terminal fragment and a C-terminal fragment as defined herein of the E7 protein of a fourth HPV type, and the heterologous polypeptide of the second type of chimeric protein comprising a N-terminal fragment and a C-terminal fragment as defined herein of the E7 protein of a fifth HPV type, a N-terminal fragment and a C-terminal fragment as defined herein of the E7 protein of a sixth HPV type and a N-terminal fragment and a C-terminal fragment as defined herein of the E7 protein of a seventh HPV type, wherein the first, second, third, fourth, fifth, sixth and seventh HPV types are different HPV types.

[0260] In a particular embodiment, the first, second, third, fourth, fifth, sixth and seventh HPV types are selected from the group consisting of (a) HPV31, HPV33, HPV52, HPV58, HPV16, HPV18 and HPV45, (b) HPV16, HPV18, HPV33, HPV45, HPV31, HPV52 and HPV58, (c) HPV16, HPV18, HPV45, HPV58, HPV31, HPV52 and HPV33, (d) HPV16, HPV18, HPV33, HPV45, HPV31, HPV58 and HPV52, (e)

[0261] HPV16, HPV18, HPV45, HPV58, HPV31, HPV33 and HPV52, and (f) HPV16, HPV18, HPV45, HPV33, HPV31, HPV52 and HPV58.

[0262] In a particular embodiment, the first, second, third and fourth HPV types are HPV16, HPV18, HPV33 and HPV45. In a particular embodiment, the heterologous polypeptide comprises or consists of the sequence as set forth in SEQ ID NO:50 or 52. In a particular embodiment, the first, second, third and fourth HPV types are HPV16, HPV18, HPV45 and HPV58. In a particular embodiment, the heterologous polypeptide comprises or consists of the sequence as set forth in SEQ ID NO:54 or 56. In a particular embodiment, the first, second, third and fourth HPV types are HPV31, HPV33, HPV52 and HPV58. In a particular embodiment, the heterologous polypeptide comprises or consists of the sequence as set forth in SEQ ID NO:40 or 42. In a particular embodiment, said first chimeric protein comprises or consists of the sequence as set forth in SEQ ID NO: 58, 61, 64 or 67, into which the sequence as set forth in SEQ ID NO: 34 or 36 has been replaced by the sequence as set forth in SEQ ID NO:40, 42, 50, 52, 54 or 56.

[0263] In a particular embodiment, independently or in combination with the embodiment regarding the HPV31, HPV33, HPV52 and HPV58 as the first, second, third and fourth HPV types, the fifth, sixth and seventh HPV types are HPV16, HPV18 and HPV45. In a particular embodiment, the heterologous polypeptide comprises or consists of the sequence as set forth in SEQ ID NO:34 or 36. In a particular embodiment, said second chimeric protein comprises or consists of the sequence as set forth in SEQ ID NO: 58, 61, 64 or 67.

[0264] In a particular embodiment, independently or in combination with the embodiment regarding the respectively HPV16, HPV18, HPV33 and HPV45 or the HPV16, HPV18, HPV45 and HPV58 as the first, second, third and fourth HPV types, the fifth, sixth and seventh HPV types are respectively HPV31, HPV52 and HPV58 or HPV31, HPV33, HPV52. In a particular embodiment, the heterologous polypeptide comprises or consists of the sequence as set forth in SEQ ID NO: 42 or 44. In a particular embodiment, independently or in combination with the embodiment regarding the respectively HPV16, HPV18, HPV33 and HPV45 or the HPV16, HPV18, HPV45 and HPV58 as the first, second, third and fourth HPV types, the fifth, sixth and seventh HPV types are respectively the HPV31, HPV52 and HPV58 or HPV31, HPV33 and HPV52. In a particular embodiment, the heterologous polypeptide comprises or consists of the sequence as set forth in SEQ ID NO: 46 or 48. In a particular embodiment, said second chimeric protein comprises or consists of the sequence as set forth in SEQ ID NO: 58, 61, 64 or 67, into which the sequence as set forth in SEQ ID NO: 34 or 36 has been replaced by the sequence as set forth in SEQ ID NO: 42, 44, 46 or 48.

[0265] In a particular embodiment, the first, second, third, fourth, fifth, sixth and seventh HPV types are selected from the group consisting of (a) HPV31, HPV33, HPV52, HPV58, HPV16, HPV18 and HPV45 respectively, (b) HPV16, HPV18, HPV33, HPV45, HPV31, HPV52 and HPV58 respectively, (c) HPV16, HPV18, HPV45, HPV58, HPV31, HPV52 and HPV33 respectively, (d) HPV16, HPV18, HPV33, HPV45, HPV31, HPV58 and HPV52 respectively and (e) HPV16, HPV18, HPV45, HPV58, HPV31, HPV33 and HPV52 respectively.

[0266] The invention relates in a particular embodiment, to the combination of the above recited antigens of the specified HPV subtypes, when these antigens are provided in the chimeric proteins in an order corresponding to above specified order of citation of the HPV subtypes or alternatively in any other order of presentation of the antigens in the chimeric proteins that would correspond to any combination of first, second, third, and when present fourth HPV among those cited and in particular among the groups of HPV16, HPV18, HPV33 and HPV45 or the group of HPV16, HPV18, HPV45 and HPV58 or the group of HPV31, HPV52 and HPV58 or the group of HPV31, HPV33 and HPV52.

[0267] In a particular embodiment, the two different chimeric proteins comprise the antigens as disclosed herein of the HPV16, HPV18, HPV45, HPV58 for the first chimeric protein and of the HPV31, HPV33, HPV52 for the second chimeric protein. In another particular embodiment the two different chimeric proteins comprise the antigens as disclosed herein of the HPV16, HPV18, HPV45, HPV33 for the first chimeric protein and of the HPV31, HPV52, HPV58 for the second chimeric protein. In another particular embodiment the two different chimeric proteins comprise the antigens as disclosed herein of the HPV31, HPV33, HPV52, HPV58 for the first chimeric protein and of the HPV16, HPV18, HPV45 for the second chimeric protein. In a preferred embodiment, but not necessarily, the HPV antigens thus defined are inserted in the chimeric proteins in the specified order.

[0268] In a particular embodiment, the composition also comprises a suitable pharmaceutical vehicle, which is for example selected from buffering agents, saline, phosphate buffered saline, dextrose, glycerol, water, ethanol and the like and combinations thereof.

[0269] In a particular embodiment, the composition, with or without suitable pharmaceutical vehicle, also comprises at least one adjuvant, preferably one adjuvant, and/or a surfactant and/or immunomodulatory substances (such as cytokines or chemokines) and/or growth factors such as GM-CSF. Various adjuvants are known in the art and include Complete Freund's Adjuvant (CFA), Incomplete Freund's Adjuvant (IFA), montanide ISA (incomplete seppic adjuvant), muramyl peptides such as muramyl dipeptide (MDP) MDP-Lys (L18) (N^{α}-acetylemuramyl-L-alanyl-D-isoglutaminyl-N^{e}steoroyl-L-lysine), zinc sulphate, colloidal iron hydroxide, calcium phosphate or calcium chloride, CpG oligodeoxynucleotides (CPG ODN) such as CPG ODN 1826 and CPG ODN 2007, MF59 which is a detergent stabilized oil-in water emulsion containing 5% squalene (w/v), 0.5% Tween® 80 (w/v) and 0.5% Span (w/v) in water, TLR4 ligands (such as MPL, GLA) TLR3 ligands (such as Poly IC, Poly-ICLC called Hiltonol®), polysaccharides (such as Inulin) and liposomes (such as cationic liposomes, ISCOMs).

[0270] In a particular embodiment, at least one adjuvant is chosen among molecules which have the capacity to activate T-cell immune response. Preferred adjuvants are the ones that bind or are agonist to TLR (Toll like receptor) 3, 4, 7, 8 and/or 9 on immune cells (such as APC). In a particular embodiment, the adjuvant is a TLR ligand, in particular a TLR ligand selected from the group consisting of TLR ligands of class 3, such as poly-ICLC, TLR ligands of class 4, such as MPL TLR ligands of class 9, such as CpG, and TLR ligands of class 7/8, such as Imiquimod. Examples of adjuvants are Imiquimod and Poly-ICLC. A commercially available drug based on Imiquimod is Aldara™ (sold as a cream containing 5% Imiquimod) Poly-ICLC can be purchased from Oncovir Inc, (WA, US) as Hiltonol®.

[0271] In a particular embodiment, the chimeric protein(s) or compositions defined herein can be injected in a patient via different routes: subcutaneous (s.c.), intradermal (i.d.), intramuscular (i.m.) or intravenous (i.v.) injection, oral administration and mucosal administration, especially intranasal administration or inhalation. In a particular embodiment, the chimeric protein(s) or compositions defined herein is/are administered intradermally.

[0272] Moreover, the chimeric protein(s) or the composition as defined herein may be combined or mixed with at least one immunopotentiator, such as at least one adjuvant, preferably one adjuvant, and/or a surfactant and/or immunomodulatory substances. By “combined”, it is meant that the chimeric protein(s) or the composition as defined herein and the immunopotentiator are both put in contact with the host, at the same or different time and/or by the same or different modes of administration, preferably at the same site of contact. In contrast, “mixed” means that the chimeric protein(s) or the composition as defined herein and the immunopotentiator are in the same formulation when administered.

[0273] The chimeric protein(s) or compositions defined herein may be in a solid form (capsule, powder, tablet, pill, suppository, quick release tablet, gastro-resistant tablet, delayed release tablet), a powder form, preferably after lyophilization (lyophilized form or lyophilized powder form) which needs to be reconstituted for example with diluents(s) before injection, or in a liquid form, such as an injectable solution or injectable suspension.

[0274] The quantity of chimeric protein(s) to be administered (dosage) depends upon the subject to be treated, including considering the condition of the patient, the state of the individual's immune system, the route of administration and the weight of the host. The conventional dosages range from 1 to 2400 μg, 100 to 2000 μg, 200 to 1000 μg, 500 to 1000 μg. A particular dosage is selected from the group consisting of 100, 200, 300, 400, 500, 600, 700, 800, 900, 1000, 1500, 2000 or 2400 μg±10%. In another embodiment, conventional dosages range from 1 to 100 μg, 1 to 50 μg and 1 to 10 μg of vector-carried polypeptide(s). The total dose for the whole treatment with the active ingredient of the invention ranges from 200 to 2400 μg, 300 to 2000 μg, 400 to 1000 μg, 500 to 800 μg. These examples can be modified by one skilled in the art, depending on circumstances.

[0275] The invention is also directed to a chimeric protein of the invention or a composition of the invention, for use as a medicament. In a particular embodiment, the chimeric protein of the invention or the composition of the invention is for use in the prophylaxis or treatment of a pathogen infection. In another embodiment, the chimeric protein of the invention or the composition of the invention is for use in the prophylaxis or treatment of an oncogenic-, preferably oncogenic tumour-, based disorder, such as tumoural disorder, malignant tumour disorder or malignant neoplasm. In a particular embodiment, the chimeric protein of the invention or the composition of the invention is for use in the induction of a prophylactic immune response or of a therapeutic immune response

[0276] In a particular embodiment, the invention also relates to a method for the therapeutic treatment of an animal or a human patient presenting with a pathogen infection or suspected to have a pathogen infection comprising (a) the administration of a chimeric protein or a composition of the invention into said animal or human patient, possibly as multiple administered doses, and (b) the follow up of the condition of said animal or human patient.

[0277] In another embodiment, the invention also relates to a method for the therapeutic treatment of an animal or a human patient presenting with tumour disorders comprising (a) the administration of a chimeric protein or a composition of the invention into said animal or human patient, possibly as multiple administered doses, and (b) the follow up of the condition of said animal or human patient.

[0278] The invention also relates to a method to prevent a pathogen infection of an animal or a human patient comprising (a) the administration of a chimeric protein or a composition of the invention into said animal or human patient, possibly as multiple administered doses, and (b) the follow up of the condition of said animal or human patient, possibly as multiple administered doses.

[0279] The invention also relates to a method to prevent the apparition or development of tumour disorders in an animal or a human patient comprising (a) the administration of a chimeric protein or a composition of the invention into said animal or human patient, possibly as multiple administered doses, and (b) the follow up of the condition of said animal or human patient.

[0280] A therapeutic treatment according to the invention aims at improving the clinical condition of an animal or a human patient in need thereof, who has been diagnosed as being infected or suspected to be infected by a pathogen or as suffering from a pathological state. In a particular embodiment, this treatment aims at the elimination of the causative agent or organism of the disease, or at lowering the abundance of said agent or organism. In a situation of viral infection, the treatment may result in a significant decrease of the viral load in the targeted tissues of the host that is less than what can be detected when measured. In case of tumoural disorders, the treatment may result at lowering the size or the development of the tumour(s), or at eradicating the tumour cells, or at reducing the number of tumour cells at a level which is less than what can be detected when measured. The therapeutic treatment also aims at improving the clinical status of the animal or human patient, by eliminating or lowering the symptoms associated with the pathogen infection or the tumour disorders, and preferably aims at restoring health.

[0281] A prophylactic treatment of an animal or a human patient aims at preventing the pathogen infection of said animal or a human patient, or preventing the apparition or development of neoplastic tumoural disorders, or preventing the occurrence of a pathological state in said animal or human patient. The prophylactic treatment encompasses vaccination.

[0282] Therapeutic and prophylactic treatments, using a chimeric protein or a composition of the invention, are based on the elicitation of an efficient immune response, preferably a cellular immune response, against the epitope(s) contained in the heterologous polypeptide in the host.

[0283] Therefore, the invention is also directed to the use of a chimeric protein or a composition of the invention to induce or elicit an immune response, preferably a cellular immune response (such a CTL response) against the epitope(s) contained in the heterologous polypeptide, in the host into which said chimeric protein or composition is administered.

[0284] In a particular embodiment, the invention is also directed to a chimeric protein or composition of the invention for use (i) in the immunotherapeutic treatment of first determined pathological condition(s) diagnosed in a mammalian host by eliciting a T cell immune response against a first group of epitopes contained in the heterologous polypeptide and (ii) in the prophylaxis against second determined pathological condition(s) in the same mammalian host by eliciting a T cell memory immune response against a second group of epitopes contained in said heterologous polypeptide, said immune responses being obtained after administration of said chimeric protein or said composition into said host, wherein said prophylaxis against second determined pathological condition(s) is not observed when said second group of epitopes is not contained in said heterologous polypeptide.

[0285] Indeed, the inventors have shown that the chimeric protein of the invention enables to bypass the competition existing between different epitopes, either regarding access to APC, processing and presentation by APC and availability of cytokines. Thus, using the chimeric protein of the invention, it is possible to induce an immune response against the first group of epitopes within a therapeutic treatment and to induce also an immune response induced against the second group of epitopes within a prophylactic treatment. Thus, the chimeric protein of the invention is efficient to elicit a T cell immune response within an immunotherapeutic treatment of first determined pathological condition(s) diagnosed in a host and to elicit a T cell memory immune response within the prophylaxis against the risk of second determined pathological condition(s) in the same host.

### Examples

### I. Material and Methods

### Mice

[0286] Six weeks-old female C57BL/6 mice (H-2^{b}) were purchased from Janvier Laboratories. Mice were housed under pathogen-free conditions with water and food ad libitum. Procedures involving animals and their care were conformed to Genticel guidelines that comply with national and international laws and policies and that are reviewed by the local ethical committee.

[0287] For some of the HPV types used in the present invention, other mice may be advantageously used, which have a different genetic background. Such mice may be purchased from Janvier laboratories and include DBA/2JRi (H2K^{d}/H2D^{d}), or CBA/JRi (H2K^{k}/H2D^{k}) SJL/JRi (H2K^{S}/H2D^{S}) and FVB/NRi (H2K^{q}/H2D^{q}).

[0288] Other mice such as humanized mice having a HLA, in particular HLA-A2 haplotype are also of interest in determining the immune response elicited by the constructs of the invention. Transgenic HLA-A2.1 mice can be purchased from TACONIC (USA) to test the immunogenicity of the described vaccine candidates against each E7 from selected HPV types in mice expressing the human HLA-A2.1 haplotype.

[0289] These mice are used to test the immunogenicity of the described candidate vaccines against each E7 from selected HPV types.

### Tumour Cell Lines

[0290] TC-1 (tissue culture number one) tumour cells [19] were prepared by transformation of C57BL/6 primary mouse lung cells with HPV16 E6 and E7 oncogenes and activated human c-Ha-Ras oncogene. The cells used in this study have been obtained from the ATCC. TC1 cells were thawed before each experiment and were then cultured and expanded in vitro during at least 10 days before injection.

[0291] Lewis lung carcinoma (LL2) is a cell line established from the lung of a C57BL/6 mouse bearing a tumour resulting from an implantation of primary Lewis lung carcinoma (13). This line is widely used as a model for metastasis and is useful for studying the mechanisms of cancer therapy (14). LL2 tumour cell line was purchased from the ATCC (CRL-1642).

[0292] These cells were transduced with lentiviral vectors bearing HPV18 E7 and GFP genes or only the GFP gene according to the manufacturer's protocol (Vectalys, Labège, France). 3 clones were selected based on MHC class I, GFP, and E7 expression. One clone was selected following prophylactic in vivo selection according to its growth profile and its ability to be targeted by HPV18 E7-specific cytotoxic T CD8⁺ lymphocytes; a take rate experiment was performed for optimal number of cells inoculation. In vivo selection, take rate and ideal time of treatment studies were performed by Oncodesign (Dijon, France). LL2 cells were thawed before each experiment and were then cultured and expanded in vitro during at least 10 days before injection.

[0293] B16-IRES-GFP-OVA (B16-GFP) and B16-MAGEA3-IRES-GFP-OVA (B16-MAGEA3-GFP) cells were used to re-stimulate ex vivo splenocytes obtained from treated mice. B16-MAGEA3 cells are B16-F10 syngeneic tumour cells transduced by Vectalys with to express the MAGE-A3 protein. GFP expression is normally linked on MAGE-A3 protein expression.

### Tumour Cells Inoculation

[0294] On day 0, C57BL/6 mice were injected with TC-1 cells (1×10⁶ cells per mouse diluted in 100 μL of PBS 1× via the subcutaneous route in the right flank. In some experiments mice were injected at day 65 with LL2-GFP or LL2-HPV18 E7-GFP cells diluted in 100 μL of PBS 1× via the subcutaneous route in the left flank.

### Vaccine

[0295] Construction and purification of recombinant CyaA-HPV16 E7_{Δ30-42} C16-1 and CyaA-HPV18 E7_{Δ}_{_{—}}₃₂₋₄₂ (C18-1).

[0296] Construction and purification were already described in EP1 576 967 B1. The two final bulks of CyaA-HPV16 E7_{Δ30-42} (C16-1) (FIG. 1A) and CyaA-HPV18 E7_{Δ32-42} (C18-1) (FIG. 1B) were mixed in Genticel at a 1:1 ratio in order to produce the bivalent composition named ProCervix which was then stored at −80° C. in aliquots.

Construction and Purification of gtCyaAd93- and gtCyaAd203-Based Vaccines:

[0297] The DNA sequence of wild type CyaA (CyaAwt: GeneBank: CAE41066.1) was optimized and synthesized (GeneCust) for the expression in E. Coli. The optimized DNA sequence is named gtCyaA. This sequence carries the following unique restriction sites added to facilitate the insertion of antigenic sequences into CyaA-catalytic domain: Nde I (CATATG), BamH I (GGATCC), EcoR I (GAATTC), EcoR V (GATATC), Pci I (ACATGT), Bcl I (TGATCA), Age I ACCGGT), Xma I (CCCGGG), Nco I (CCATGG).

[0298] The gtCyaA was then inserted in the pGTPc608 plasmid that contains a pTAC inducible promoter (plasmid provided by GTP Technology, Labege, France).

[0299] Two deletion mutants were tested: a deletion of 93 amino acids from position 228 to position 320 of B. pertussis CyaA and a deletion of 203 amino acids from position 184 to position 386 of B. pertussis CyaA. The first deletion of 93 residues removes the calmoduline interacting domain (domain III). The second deletion of 203 residues removes domains II and III.

[0300] The deletions of 93 and 203 aa in gtCyaA were generated while inserting the antigens.

[0301] Purification of each expressed protein has been achieved by chromatography procedures; in particular ionic exchange affinity chromatography and hydrophobic exchange chromatography techniques were performed.

Construction and Purification of gtCyaAd93-Pep216-CyaCopt and gtCyaAd203-Pep216-CyaCopt

[0302] All Antigens were synthesized by DNA 2.0. (USA) or Genecust (Germany) and cloning was performed by Solvias, Switzerland. A schematic representation of gtCyaAd93-pep216-CyaACopt and gtCyaAd203-pep216-CyaACopt is given in FIGS. 3A and 3B.

[0303] BLR bacterial strains were electroporated with each plasmid respectively. The transfected bacteria were grown in classical media and productions induced by addition of IPTG.

[0304] Purification of each expressed protein has been achieved by chromatography procedures; in particular ionic exchange affinity chromatography and hydrophobic exchange chromatography techniques were performed.

### Construction of CyaAd203-Pep105:

[0305] The CyaAd203-PEP105ₒₚₜ protein is composed by an adenylate cyclase sequence deleted of 203aa, containing, as an antigenic insert, the polypeptide 105 (PEP105). The optimized sequence of CyaA was cloned into the pKTRACE plasmid as described previously in the Ndel and BamHI restriction sites. Pep105 antigen was synthesized and cloned between EcoRI and Xmal restriction sites. Purification protocol was already described in EP1 576 967 B1. A schematic representation of pKTRACE CyaAd203-pep105ₒₚₜ is given in FIG. 4.

[0306] The polypeptide pep105 (SEQ ID NO: 24) comprises from N-terminal to C-terminal the following antigens. Some antigens have been fused whereas others are separated by linker. A particular linker (AS dipeptide) has been introduced before the GVNHQHL sequence to generate a strong murine MHC class I restricted epitope (H-2^{b} restricted) for immune response calibration (in bold):

restriction sites:
MGIR
GFP11:
SRDHMVLHEYVNAAGIT
linker:
GSDR
MOG₃₅₋₅₅:
MEVGWYRSPFSRVVHLYRNGK
OVA₂₅₇₋₂₆₄ (MHC class I-restricted peptide from
the ovalbumin protein):
SIINFEKL
IE₁₉₁₋₁₁₀:
VRVDMVRHRIKEHMLKKYTQ
CLA4-TCR H-2Kd HA₅₁₂₋₅₂₀:
IYSTVASSL
linker:
SGEK
OVA₃₂₃₋₃₃₉ (MHC class II restricted peptide):
ISQAVHAAHAEINEAGR
MELAN-A₂₆₋₃₅:
ELAGIGILTV
HA₃₀₇₋₃₁₉:
PKYVKQNTLKLAT
LCMV H2-Db restricted GP₃₃₋₄₁:
KAVYNFATC
restriction sites:
SG
MAGEA3₁₁₁₋₁₈₀:
RKVAELVHFLLLKYRAREPVTKAEMLGSVVGNWQYFFPVIFSKA
SSSLQLVFGIELMEVDPIGHLYIFAT
MAGEA3₂₄₄₋₂₈₅:
KLLTQHFVQENYLEYRQVPGSDPACYEFLWGPRALVETSYVK
restriction sites:
TG
HPV16E7 (truncated sequence):
MHGDTPTLHEYMLDLQPETTDLYCYEQLNGPAGQAEPDRAHYNI
VTFCCKCDSTLRLCVQSTHVDIRTLEDLLMGTLGIVCPICSQKP
HPV18E7 (truncated sequence):
MHGPKATLQDIVLHLEPQNEIPVDLLCHEQLSASGVNHRHLPAR
RAEPQRHTMLCMCCKCEARIELVVESSADDLRAFQQLFLNTLSF
VCPWCASQQ
restriction sites:
LKGP

### Vaccine Administration

[0307] On day 11, after tumour measurement, mice with detectable solid tumours were vaccinated by intradermal (id) injection into ears dermis (both ears were injected).

### Adjuvant Molecules

[0308] Poly-ICLC (TLR3 agonist) was provided by Oncovir (Inc, WA, US) in vials containing 1 mL of 2 mg/mL opalescent sterile solution. The Poly-ICLC was left in the original recipient and stored at +4° C. Poly-ICLC for injection contains 2 mg/mL of poly-IC stabilized with 1.5 mg/mL poly-L-Lysine and 5 mg/mL sodium carboxymethylcellulose in 0.9% sodium chloride solution and adjusted to pH 7.6-7.8 with sodium hydroxide.

### Tumour Measurement

[0309] Different parameters were taken into account to evaluate tumour development in mice:
[0310] Tumour size: Tumours were measured manually using a caliper twice a week starting 5 days post-tumour cells inoculation and until day 60. Tumour volume was then calculated as follow: volume=(Length×width²)/2.
[0311] Mice survival: for ethical reasons mouse developing abnormally important (limit size: 2000 mm³) and/or necrotic tumours, or with tumour-induced impaired mobility were euthanized.
[0312] Number of tumour-free mice: This information indicates when therapeutic vaccination has induced a full tumour regression (absence of palpable tumour).

### Measurement of CD8 T Cell Memory Cytototoxic Responses

[0313] The method for measuring cytotoxicity of CD8⁺ T cells in vivo has been extensively described [22, 23]. Briefly, syngeneic splenocytes from naive mice are labeled with different concentrations of CFSE (Carboxyfluorescein succinimidyl ester, Molecular Probes Invitrogen) and either pulsed in vitro with relevant peptides or let unpulsed. Both peptide-pulsed and unpulsed target cells populations were adoptively transferred intravenously into syngeneic vaccinated hosts and the loss of peptide-pulsed targets was measured by flow cytometry (BD FACSCanto II) into the spleen. The percentage of killing was estimated from the reduction in the ratio of the percentage of pulsed target cells to unpulsed cells, corrected by the initial ratio (see below). Cellular preparations were analyzed by flow cytometry before injection to monitor CFSE labelling of the different target cells and get reference values (real percentage of each cellular population) for the calculation of the in vivo killing percentage. The three target cells populations were then injected intravenously at a 1:1:1 ratio to each vaccinated mice. The percentage of in vivo killing is calculated as described elsewhere with the following formula [24]:

PERCENT KILLING=100−([(% peptide pulsed in vaccinated/% unpulsed in vaccinated)/(% peptide pulsed before injection/% unpulsed before injection))×100)

[0314] IFN-γ ELISpot (Enzyme-Linked-Immunospot) Assay

[0315] Frequencies of IFN-γ producing specific CD8⁺ T cells were evaluated by an ex vivo restimulation of splenocytes with either H-2^{b}-restricted peptides (HPV16 E7₄₉₋₅₇ and HPV18 E7_{AS43-49}) or peptide bank of HPV45 E7 protein. This was achieved by performing an IFN-γ ELISpot assay:

[0316] ELISpot assay was performed on pooled splenocytes of mice.

[0317] Briefly, total splenocytes obtained from vaccinated mice are let unstimulated or restimulated for 20 h at 37° C., 5% CO₂ with 1 μg/mL of each peptide as described below:
[0318] 1×10⁶ cells/well with the HPV16 E7₄₉₋₅₇ peptide (H-2^{b} restricted relevant epitope)
[0319] 1×10⁶ cells/well with OVA₂₅₇₋₂₆₄ (H-2^{b} restricted irrelevant epitope).
[0320] 0.25×10⁶ cells/well with HPV18 E7_{AS43-49} (H-2^{b} restricted relevant epitope).
[0321] 1×10⁶ cells/well with the HPV45 E7 peptide bank

[0322] For the experiment with the CyaAd203-PEP105ₒₚₜ, additional antigenic stimulations were used:
[0323] #116-2/3 peptides bank (5 μg/ml): pool of #116-2 and #116-3 (1×10⁶ cells per well)
[0324] #171 peptides bank (3 μg/ml): pool of #171-1, #171-2 and #171-3 (1×10⁶ cells per well)
[0325] OVA₃₂₃₋₃₃₉, MHC-class II restricted peptide, used at 10 μg/ml (1×10⁶ cells per well)
[0326] LCMV GP₃₃₋₄₁, MHC-class I restricted peptide, used at 1 μg/ml (1×10⁶ cells per well)
[0327] MOG₃₅₋₅₅, MHC-class II restricted peptide, used at 10 μg/ml (1×10⁶ cells per well)
[0328] His-tagged MAGEA3 (TAA_{—}002_MAGE-3) protein produced at Genticel, used at 10 μg/ml.
[0329] Splenocytes: B16-GFP cells (MAGEA3 expressing or not) were cocultured at a 19:1 ratio (950000 splenocytes:50000 B16 cells).

[0330] IFN-γ secretion was monitored by a sandwich based ELISpot revealed by BCIP/NBT using streptavidin-AKP. Data were analyzed on a Bioreader 5000-Pro S (Biosys).

### II. Results

### A. Confirmation of the Capacity of New Vectors of the Invention to Induce Immune Response Against a Model Antigen

[0331] In order to confirm the efficiency of the new vectors of the invention in their ability to deliver large and multi-epitopic antigens, a model antigen was designed with 441 amino acids (SEQ ID NO:24).

[0332] Mice were vaccinated with the CyaAd203-pep105ₒₚₜ protein, at day 0 and euthanatized at day 7, spleens were collected and splenocytes isolated. Using these cells, T-cell mediated responses were measured using IFN-γ and IL-2 ELISpot assays. Mice vaccinated with ProCervix were used as positive controls for induction of HPV16 E7 and HPV18 E7 specific T cell responses and as negative control for the others antigens which are only delivered by the CyaAd203-PEP105ₒₚₜ. All vaccinations were adjuvanted by co-injection of Poly-ICLC.

### A.1. Induction of HPV16 E7 HPV18 E7 and OVA₂₅₇₋₂₆₄ Specific IFN-γ Responses

[0333] FIG. 5 illustrates the results obtained after HPV16 E7₄₉₋₅₇, HPV18 E7_{AS43-49} and OVA₂₅₇₋₂₆₄ class I restricted peptides and HPV16 E7 (#116-2/3) and HPV18 E7 (#171-1/2/3) 15-mers peptides banks restimulation. The following conclusions can be drawn:
[0334] No antigen-specific immune responses were detected in the group of mice vaccinated by Poly-ICLC adjuvanted-Placebo.
[0335] Regarding the group of mice vaccinated with Poly-ICLC-adjuvanted ProCervix vaccination, whatever the restimulation, expected results were obtained:
   [0336] in vitro restimulation with HPV16E7₄₉₋₅₇ and HPV18E7_{AS43-49} class I restricted peptides induced clear HPV16 E7 and HPV18 E7-specific IFN-γ responses;
   [0337] there was no specific response obtained with the OVA₂₅₇₋₂₆₄ restimulation;
   [0338] intensity of HPV16 E7 and HPV18 E7-specific IFN-γ responses obtained with peptides banks (#11 6-2/3 and #171-1/2/3) were close to the level of responses obtained with MHC class I restricted peptides (HPV16E7₄₉₋₅₇, HPV18 E7_{AS43-49}).
[0339] Regarding mice vaccinated with Poly-ICLC-adjuvanted CyaAd203-PEP105opt, detection of HPV16 E7 and HPV18 E7-specific IFN-γ responses with both HPV16 E7 and HPV18 E7 peptides banks (#116-2/3 and #171-1/2/3) and all the MHC class I restricted peptides tested for ProCervix: HPV16E7₄₉₋₅₇, HPV18E7_{AS43-49} and also with the OVA₂₅₇₋₂₆₄ peptide.

[0340] These results showed that the ex vivo re-stimulation with all these different peptides were able to re-stimulate HPV18 E7, HPV16 E7 and OVA₂₅₇₋₂₆₄ antigen-specific T-cells elicited by CyaAd203-PEP105ₒₚₜ intradermal vaccination.

### A.2. Induction of T-Cell Mediated IFN-γ Responses Specific for Antigens OVA₃₂₃₋₃₃₉, LCMV GP₃₃₋₄₁ MOG₃₅₋₅₅ and MAGEA3

[0341] FIG. 6 depicts results obtained after different types of ex vivo restimulation:
[0342] OVA₃₂₃₋₃₃₉, MHC-class II restricted peptide
[0343] LCMV GP₃₃₋₄₁, MHC-class I restricted peptide
[0344] MOG₃₅₋₅₅, MHC-class II restricted peptide
[0345] His-tagged MAGEA3 protein.
[0346] B16-MAGEA3-GFP tumour cells were used as APC to stimulate antigen-specific CD8⁺ T cells via presentation of MHC class I restricted epitopes resulting from the endogenous processing of the MAGE-A3 protein. The B16-GFP cells which are not expressing the MAGE-A3 protein were tested too as a negative control for MAGEA3 immune response specificity.

[0347] We can observe that for all group, the protein His-tag MAGE-3 induced the same unspecific response.

[0348] For mice vaccinated with Poly-ICLC-adjuvanted Placebo or Poly-ICLC-adjuvanted ProCervix, no immune responses to these antigens were detected.

[0349] For mice vaccinated with Poly-ICLC-adjuvanted CyaAd203-PEP105opt, antigen-specific IFN-γ secreting T cells were detected after OVA₃₂₃₋₃₃₉, GP₃₃₋₄₁ and MOG₃₅₋₅₅ peptides restimulation, but also after B16-GFP and B16-MAGEA3-GFP cells restimulation.

[0350] These results showed that CyaAd203-PEP105ₒₚₜ vaccination has elicited I-A^{b}-restricted OVA₃₂₃₋₃₃₉, H-2D^{b}-restricted LCMV GP₃₃₋₄₁ and MOG₃₅₋₅₅ and GFP11 antigen-specific T-cells.

[0351] Taken together, these results highlight the exquisite efficiency of CyaA-based vaccine vectors to mount both strong Ag-specific CD4⁺ T cells and CD8⁺ T cells in a multi-epitopic fashion.

[0352] Unfortunately, MAGEA3-specific responses could not be measured correctly as similar frequencies of IFN-γ secreting T cells were obtained after ex vivo restimulation with both cell lines: B16-GFP or B16-MAGEA3-GFP. As the CyaAd203-PEP105ₒₚₜ embeds the GFP11 antigen, immunisation with this vaccine vector has induced GFP-specific T-cell responses which masked the MAGEA3-specific T cell response.

[0353] This study highlights for the first time the ability of a 203 residue-deleted CyaA vaccine vector to induce, in the same vaccinated mouse, antigen-specific T cell responses against several unrelated T-cell epitopes. Besides, these results also showed the exquisite ability of this 203 residue-deleted CyaA vaccine vector to induce both CD4⁺ and CD8⁺ T cell responses (specific responses detected against both MHC I and MHC II restricted peptides)

### B. Design of HPV Antigens

[0354] Seven E7 sequences from the 7 highest risk HPV types (16, 18, 45, 31, 33, 52 and 58) have been selected based on their prevalence in women with Invasive Cell Carcinoma (ICC) and in women infected by HPV but with normal cytology [9], [10]: HPV16 E7 variant (gi_{—}30172006; SEQ ID NO:25), HPV18 E7 variant (gi_{—}167996747; SEQ ID NO:26), HPV31 E7 variant (gi_{—}148727610; SEQ ID NO:27), HPV33 E7 variant (gi_{—}257472286; SEQ ID NO:28), HPV45 E7 variant (gi_{—}549287; SEQ ID NO:29), HPV52 E7 variant (gi_{—}237861305; SEQ ID NO:30) and HPV58 variant (gi_{—}19111001; SEQ ID NO:32).

[0355] E7 is composed of two functional domains separated by an acidic region. These domains have been extensively described [11-13]. The N-terminal part of the protein contains the pRB binding motif (LXCXE) and the C-terminal part of the protein contains the Zinc-finger loop. The alignment of the E7 proteins of HPV16, 18 and 45 is provided in FIG. 7A, and the alignment of the E7 proteins of HPV 31, 33, 52 and 58 is provided in FIG. 7B.

[0356] Two recombinant antigens were composed by fusion in each of three E7 sequences of respectively HPV16, 18 and 45 (with or without the acidic regions). In addition, two recombinant antigens were composed by fusion of four E7 sequences of respectively HPV 31, 33, 52 and 58 (with or without the acidic regions). The presence or not of the acidic region of each E7 follows the rational exposed in WO 2005089792, that follows the rules dictated by the literature. Indeed, acidic sequences in CyaA have been described as deleterious for the normal translocation of the catalytic domain of CyaA into the cytosol[8]. Thus here sequences with and without this region allowed to test the capacity of the new vectors of the invention (gtCyaAd93 and gtCyaAd203) to deliver these antigens to the cytosol of APCs.

[0357] The antigens composed of HPV16, 18 and 45 E7 sequences have been designed to generate candidate trivalent CyaA-vectored vaccines. These sequences have either been deleted for the acidic region or not deleted (full length) and the E7 sequences have been split up and inverted so as to obtain the arrangement represented in FIG. 8A. The sequences of the two trivalent candidate antigens have been further modified to introduce a strong T-cell murine epitope described in WO 2005089792. This epitope is generated by insertion of a dipeptide Alanine-Serine (AS) at the beginning of the sequence GVNHQHL of HPV18 E7, which is in the C-terminal part of the protein, flanking the acidic region.

[0358] The antigens composed of HPV31, 33, 52 and 58 E7 sequences have been designed to generate candidate tetravalent CyaA-vectored vaccines. As for the trivalent antigens, these sequences have been deleted of the acidic region or not deleted, and the E7 sequences have been split up and inverted so as to obtain the arrangement represented in FIG. 8B.

[0359] For each candidate, a search for the presence of epitope(s) which may induce a response against human proteins was performed. Surprisingly, the wild type sequence of HPV52 E7 contains naturally a sequence which could be an auto-immune epitope, a B*2705 epitope (9-mer, MHC I). The sequence of this epitope is 100% identical to a sequence of the human ITPR3 (Inositol 1,4,5-tri-phosphate receptor, type 3). To avoid this epitope, the sequence of HPV52 E7 has been modified based on the sequence homology with the E7 proteins of HPV31, 33 and 58 types, to replace a methionine by a leucine at position 84 and a leucine by a methionine at position 86 of SEQ ID NO: 30 (the modified sequence is LRTLQQLLM). The sequence of the modified full length E7 protein of HPV52 is as set forth in SEQ ID NO:31. Thus, the novelty of the sequences of the tetravalent antigens is derived from the arrangement of the C- and N-terminal of the E7 proteins, and the presence of the two modifications carried out in the HPV 52 E7 sequence.

[0360] The electrostatic charge of these particular antigens has been calculated as explained above. These antigens have an acidic charge inferior to − 6 and carry respectively 21 cysteines in the trivalent antigens and 28 cysteines in the tetravalent antigens. The features of these antigens are summarized in table 2.

TABLE 2
features of various HPV antigens

| | | Size | Electro- |
|---|---|---|---|
| Name and | | (resi- | static |
| SEQ ID | HPV valences | dues) | charge |
| Pep216 | HPV16, 18 and 45 E7 proteins (trivalent), | 276 | −16 |
| (SEQ ID | deleted for their acidic domain | | |
| NO: 34) | | | |
| Pep217 | full length HPV16, 18 and 45 E7 proteins | 311 | −37 |
| (SEQ ID | (trivalent) | | |
| NO: 36) | | | |
| Pep233 | HPV31, 33, 52 and 58 E7 proteins, | 337 | −13 |
| (SEQ ID | (tetravalent), deleted for their | | |
| NO: 38) | acidic domain | | |
| Pep234 | full length HPV31, 33, 52 and 58 E7 | 392 | −38 |
| (SEQ ID | proteins (tetravalent), | | |
| NO: 40) | | | |

C. Large Deletions within the Catalytic Domain of CyaA Allow Insertion of Large and Complex Antigens

[0361] The DNA of the trivalent Pep216 and Pep217 antigens and of the tetravalent Pep233 and Pep234 antigens has been synthesized and cloned into the new gtCyaAd93 and gtCyaAd203 vectors. As controls, each E7 protein was inserted individually in gtCyaAd93, to see whether the E7 sequence of HPV31, 33, 45, 52 and 58 was problematic as they were never inserted in a CyaA protein before.

TABLE 3
features of chimeric proteins of the invention (the sequence of
BTpr_114 is as set forth in SEQ ID NO: 58; the sequence of
BTpr_116 is as set forth in SEQ ID NO: 61; the sequence of
BTpr_115 is as set forth in SEQ ID NO: 64; the sequence of
BTpr_117 is as set forth in SEQ ID NO: 67); the sequence of
the E7 insert of BTpr_131 is as set forth in SEQ ID NO: 70;
the sequence of the E7 insert of BTpr_132 is as set forth in
SEQ ID NO: 71; the sequence of the E7 insert of BTpr_133 is
as set forth in SEQ ID NO: 73; the sequence of the E7 insert
of BTpr_134 is as set forth in SEQ ID NO: 74; the sequence of
the E7 insert of BTpr_120 is as set forth in SEQ ID NO: 72.

| | | gtCyaA | |
|---|---|---|---|
| Valence of | Protein | deletion | |
| candidates | code | (vector) | Antigens specificity |
| Trivalent | BTpr_114 | 93 | HPV16, 18, 45 E7 proteins, deleted |
| | | | for their acidic domain |
| | BTpr_116 | 203 | HPV16, 18, 45 E7 proteins, deleted |
| | | | for their acidic domain |
| | BTpr_115 | 93 | full length HPV16, 18, 45 E7 proteins |
| | BTpr_117 | 203 | full length HPV16, 18, 45 E7 proteins |
| Tetrava- | BTpr_143 | 93 | HPV31, 33, 52 and 58 E7 proteins, |
| lent | | | deleted for their acidic domain |
| | BTpr_144 | 203 | HPV31, 33, 52 and 58 E7 proteins |
| | | | deleted for their acidic domain |
| | BTpr_145 | 93 | full length HPV31, 33, 52 and 58 E7 |
| | | | proteins |
| | BTpr_146 | 203 | full length HPV31, 33, 52 and 58 E7 |
| | | | proteins |
| Monova- | BTpr_131 | 93 | HPV31 E7, deleted for its acidic region |
| lent | BTpr_132 | 93 | HPV33 E7, deleted for its acidic region |
| | BTpr_133 | 93 | HPV52 E7, deleted for its acidic region |
| | BTpr_134 | 93 | HPV58 E7, deleted for its acidic region |
| | BTpr_120 | 93 | HPV45 E7, deleted for its acidic region |

[0362] The production and analytical characteristics of these monovalent, trivalent and tetravalent antigens have been evaluated.

[0363] Thus, Pre-Master Cell Banks (pre-MCB) were performed for each construction and tested for induction of the proteins of interest with IPTG (FIG. 9). Monovalent and trivalent candidates had a normal profile after induction on SDS-page gel analysis while tetravalent candidates show a weak band at the expected size.

[0364] This profile was confirmed for each molecule fermented in 5 liter fermentor. Characteristics of produced chimeric proteins are summarized in Table 4.

TABLE 4
production and analytical characteristics of monovalent,
trivalent and tetravalent chimeric proteins

| | Pu- | LPS | HCP | |
|---|---|---|---|---|
| Protein | rity | content | content | Enzymatic activity |
| code | % | EU/mg | % | (cAMP test) |
| BTpr_114 | 93 | <100 | <2 | No enzymatic activity detected |
| BTpr_116 | 91 | <100 | <2 | No enzymatic activity detected |
| BTpr_115 | 93 | >100 and | <2 | No enzymatic activity detected |
| | | <500 | | |
| BTpr_117 | 90 | <100 | <2 | No enzymatic activity detected |
| BTpr_143 | 11 | <100 | <2 | No enzymatic activity detected |
| BTpr_144 | 11 | <100 | <2 | No enzymatic activity detected |
| BTpr_131 | 96 | <100 | <2 | No enzymatic activity detected |
| BTpr_132 | 96 | <100 | <2 | No enzymatic activity detected |
| BTpr_133 | 96 | <100 | <2 | No enzymatic activity detected |
| Btpr_134 | 96 | <100 | <2 | No enzymatic activity detected |
| Btpr_120 | 97 | <100 | <2 | No enzymatic activity detected |

[0365] From a production point of view, whatever the deletion, the recombinant gtCyaAs with the monovalent and trivalent antigens give acceptable yield and purity (>90%), while the tetravalent candidates have a reduced purity (11% of protein of interest).

[0366] Considering overall purity when comparing candidates bearing the deletion of 93 residues versus candidates deleted of 203 residues, it appears that the latter have a yield inferior to the gtCyaAd93 (Btpr114 & Btpr_{—}115) constructs. This difference is quite surprising as one would expect the shorter recombinant gtCyaA to be easier to produce.

[0367] Both vectors with their antigens have no enzymatic activity highlighting that the deletion is sufficient to detoxify the vectors.

D. Production of GtCvaAs with at Least 4 E7 is Sequence Dependent

[0368] We further investigated whether the results obtained with the tetravalent candidates were due to the number of E7 polypeptide sequences in CyaA or to a particular assembly of E7 polypeptide sequences in CyaA. For that purpose, various constructs were tested (Table 5).

TABLE 5
chimeric proteins with trivalent and tetravalent HPV antigens

| Protein | gtCyaA | | Insert |
|---|---|---|---|
| code | deletion | HPV types in the insert | size |
| Btpr_161 | 93 | 31, 52, 58 E7 proteins, deleted for | 253 aa |
| | | their acidic region | |
| Btpr_162 | 93 | 31, 33, 52 E7 proteins, deleted for | 253 aa |
| | | their acidic region | |
| Btpr_163 | 93 | 16, 18, 45, 33 E7 proteins, deleted | 360 aa |
| | | for their acidic region | |
| Btpr_164 | 93 | 16, 18, 45, 58 E7 proteins, deleted | 360 aa |
| | | for their acidic region | |
| Btpr_165 | 93 | full length 31, 52, 58 E7 proteins | 295 aa |
| Btpr_166 | 93 | full length 31, 33, 52 E7 proteins | 294 aa |
| Btpr_167 | 93 | full length 16, 18, 45, 33 E7 proteins | 408 aa |
| Btpr_168 | 93 | full length 16, 18, 45, 58 E7 proteins | 409 aa |
| Btpr_169 | 203 | 31, 52, 58 E7 proteins, deleted for | 253 aa |
| | | their acidic region | |
| Btpr_170 | 203 | 31, 33, 52 E7 proteins, deleted for | 253 aa |
| | | their acidic region | |
| Btpr_171 | 203 | 16, 18, 45, 33 E7 proteins, deleted for | 360 aa |
| | | their acidic region | |
| Btpr_172 | 203 | 16, 18, 45, 58 E7 proteins, deleted for | 360 aa |
| | | their acidic region | |
| Btpr_173 | 203 | full length 31, 52, 58 E7 proteins | 295 aa |
| Btpr_174 | 203 | full length 31, 33, 52 E7 proteins | 294 aa |
| Btpr_175 | 203 | full length 16, 18, 45, 33 E7 proteins | 408 aa |
| Btpr_176 | 203 | full length 16, 18, 45, 58 E7 proteins | 409 aa |

[0369] Pre-MCB induction tests were performed and surprisingly the number of E7 sequences in CyaA was not the limit. It was rather the overall sequence nature of the antigen. Moreover, Btpr_{—}161, 162, 169 and 170 showed lower yields of protein of interest when compared to the full length antigens (BTpr_{—}165, 166, 173 and 174) (Table 6).

TABLE 6
Summary of pre-MCB induction results

| Protein | | gtCyaA | |
|---|---|---|---|
| code | HPV types in the insert | deletion | Inductibility results |
| Btpr_161 | 31, 52, 58 E7 proteins, | 93 | Weaker protein expression |
| | deleted for their acidic region | | than Btpr_165 |
| Btpr_162 | 31, 33, 52 E7 proteins, | 93 | Weaker protein expression |
| | deleted for their acidic region | | than BTpr_166 |
| Btpr_163 | 16, 18, 45, 33 E7 proteins, | 93 | significantly better profile |
| | deleted for their acidic region | | expression than BTpr_143 |
| Btpr_164 | 16, 18, 45, 58 E7 proteins, | 93 | significantly better profile |
| | deleted for their acidic region | | expression than BTpr_143 |
| Btpr_165 | full length 31, 52, 58 E7 | 93 | Protein expression profile |
| | proteins | | similar BTpr_114 |
| Btpr_166 | full length 31, 33, 52 E7 | 93 | Protein expression profile |
| | proteins | | similar BTpr_114 |
| Btpr_167 | full length 16, 18, 45, 33 E7 | 93 | / |
| | proteins | | |
| Btpr_168 | full length 16, 18, 45, 58 E7 | 93 | / |
| | proteins | | |
| Btpr_169 | 31, 52, 58 E7 proteins, | 203 | Weaker protein expression |
| | deleted for their acidic region | | than Btpr_173 |
| Btpr_170 | 31, 33, 52 E7 proteins, | 203 | Weaker protein expression |
| | deleted for their acidic region | | than Btpr_174 |
| Btpr_171 | 16, 18, 45, 33 E7 proteins, | 203 | / |
| | deleted of the acidic region | | |
| Btpr_172 | 16, 18, 45, 58 E7 proteins, | 203 | / |
| | deleted for their acidic region | | |
| Btpr_173 | full length 31, 52, 58 E7 | 203 | Protein expression profile |
| | proteins | | similar BTpr_114 |
| Btpr_174 | full length 31, 33, 52 E7 | 203 | Protein expression profile |
| | proteins | | similar BTpr_114 |
| Btpr_175 | full length 16, 18, 45, 33 E7 | 203 | / |
| | proteins | | |
| Btpr_176 | full length 16, 18, 45, 58 E7 | 203 | / |
| | proteins | | |

[0370] From the experiments above, we can conclude that gtCyaAd93 and gtCyaAd203 accept the equivalent polypeptide sequence corresponding to at least 4 E7 proteins. However, the sequence and arrangement of chosen E7 fragments may have an impact on yield and purity and thus have more or less favourable industrialization potential.

Confirmation of Results Observed with the Pre-MCB

[0371] The inventors further investigated if the results obtained at the pre-MCB level were confirmed with a particular focus on tetravalent constructs in the gtCyaAd93 vector. Proteins that had a better expression profile than BTpr_{—}143 or equivalent to BTpr_{—}115 were tested at 5 L scale. The following table summarizes the results obtained.

TABLE 7
Summary of pre-MCB induction and 5 L production results

| Protein | HPV types in the | gtCyaA | Inductibility results | |
|---|---|---|---|---|
| code | insert | deletion | (pre-MCB) | 5 liters scale results |
| Btpr_163 | 16, 18, 45, 33 E7 | 93 | significantly better | Productivity at least 3 times |
| | proteins deleted | | profile expression | superior and purity at least |
| | of the acidic | | than BTpr_143 | 6 times superior to |
| | region | | | BTpr_143 |
| Btpr_164 | 16, 18, 45, 58 E7 | 93 | significantly better | Productivity at least 4 |
| | proteins deleted | | profile expression | times superior and purity at |
| | of the acidic | | than BTpr_143 | least 6 times superior to |
| | region | | | BTpr_143 |
| Btpr_165 | 31, 52, 58 E7 | 93 | Protein expression | Productivity at least 1.5 |
| | proteins full | | profile similar | time superior to BTpr_115 |
| | length | | BTpr_115 | and purity equivalent |
| Btpr_166 | 31, 33, 52 E7 | 93 | Protein expression | Productivity at least 1.5 |
| | proteins full | | profile similar | times superior to BTpr_115 |
| | length | | BTpr_115 | and purity equivalent |
| Btpr_167 | 16, 18, 45, 33 E7 | 93 | Better profile | Productivity at least 2 |
| | proteins full | | expression than | times superior to BTpr_143 |
| | length | | BTpr_143 | and purity at least 5 times |
| | | | | superior |
| Btpr_168 | 16, 18, 45, 58 E7 | 93 | Better profile | Productivity at least 3 times |
| | proteins full | | expression than | superior to BTpr_143 and |
| | length | | BTpr_143 | purity at least 5 times |
| | | | | superior |
| Btpr_173 | 31, 52, 58 E7 | 203 | Protein expression | Productivity at least 2 times |
| | proteins full | | profile similar | superior to BTpr_117 and |
| | length region | | BTpr_117 | purity equivalent. |
| Btpr_175 | 16, 18, 45, 33 E7 | 203 | Better protein | Productivity inferior to |
| | proteins full | | expression profile | BTpr_143 despite a |
| | length | | than Btpr_143 | significant better purity (at |
| | | | | least 6 times) |

From the experiment above, it has been concluded that:
[0372] 1. Overall productivity and purity has been improved for all the tested constructs except for Btpr_{—}175.
[0373] 2. Productivity and expression profiles are always inferior in recombinant proteins with gtCyaAd203 than with gtCyaAd93.
[0374] 3. The gtCyaAd93 vector allows the production of recombinant proteins containing 4 HPV antigens with a better yield and purity than the gtCyaAd203 vector.
[0375] 4. These results confirm the observations made on the pre-MCB.
   E. gtCvaAd93 and gtCvaAd203 Containing Large Antigens are Immunogenic

### E.1 Immunogenicity of BTpr_{—}114, BTpr_{—}115, BTpr_{—}116 and BTpr_{—}117

[0376] The immunogenicity of the BTpr_{—}114, BTpr_{—}115, BTpr_{—}116 and BTpr_{—}117 chimeric proteins, was further investigated. Mice were vaccinated intradermally either with the placebo or with ProCervix (positive control composed of CyaA-HPV16 E7+CyaA-HPV18 E7) or with Btpr_{—}114 (gtCyaAd93-PEP216-CyaCopt), BTpr_{—}115 (gtCyaAd93-pep217-CyaCopt), BTpr_{—}116 (gtCyaAd203-pep216-CyaCopt) and BTpr_{—}117 (gtCyaAd203-pep217-CyaCopt) respectively. All groups were adjuvanted with poly IC-LC. 7 days after vaccination mice were euthanized and splenocytes were restimulated with previously identified MHC class I restricted peptides. Results were presented in FIG. 10.

[0377] FIG. 10 showed that:
[0378] the immunisation with 10 μg of ProCervix induced an expected level of HPV16 E7₄₉₋₅₇ and HPV18 E7_{AS43-49}-specific IFN-γ response.
[0379] antigen-specific responses obtained with trivalent candidates vaccines were equivalent to the one obtained with ProCervix.
[0380] no differences were observed between trivalent candidates, in the frequency of specific T cells responses.
[0381] the lower response against the HPV16 antigen is due to the fact that the HPV16 epitope is a weaker than the HPV 18 epitope to which C56LB/6 mice are very sensitive.

[0382] These observations enabled to conclude that poly-ICLC-adjuvanted gtCyaAd93-PEP216-CyaCopt, gtCyaAd203-PEP216-CyaCopt, gtCyaAd93-PEP217-CyaCopt and gtCyaAd203-PEP217-CyaCopt are as efficient as poly-ICLC-adjuvanted ProCervix in the induction of HPV16 E749-57 and HPV18 E7AS43-49-specific IFN-γ responses in mice after intradermal immunization.

[0383] Since no MHC-I-restricted peptide was identified for HPV45 E7 in mice at the time of the experiment, splenocytes were restimulated with an HPV45 E7-peptide library divided into three sub-pools (#218-1, #218-2 and #218-3). This experiment is the first restimulation, known to the inventors, made with a peptide library rather than with a peptide corresponding to a known epitope.

[0384] FIG. 11 showed that the in vitro restimulation with #218-3 peptide sub-pool, but not the #218-1 and #218-2 sub-pools, was able to re-stimulate T-cells elicited by gtCyaAd93-PEP216-CyaCₒₚₜ, gtCyaAd203-PEP216-CyaCₒₚₜ, gtCyaAd93-PEP217-CyaCₒₚₜ and gtCyaAd203-PEP217-CyaCₒₚₜ vaccination. The peptide sequence responsible for this immune response is IELTVESSAEDLRTL.

[0385] Strikingly, similar response was observed with the group vaccinated with ProCervix, which does not carry the HPV45 E7 sequence. This result can be explained by a cross reactivity between epitopes present in the #218-3 pool and the HPV16 E7 or HPV18 E7 sequences contained in the ProCervix vaccine.

[0386] Together, these results show that antigen with a complex structure (21 cysteins) and acidic charges are correctly delivered by gtCyaAd93 and gtCyaAd203 and processed by Antigen Presenting cells (APC). This is unexpected taking into consideration the results taught in Preville et al. [5], Karimova et al. [7] and Gmira et al. [8].

[0387] Moreover, the deletion performed in the catalytic domain of CyaA could provide an advantage regarding the delivered heterologous polypeptide, by decreasing the level of CyaA-specific T-cell and CyaA-specific B-cell responses (said deletion resulting in the decrease in number mainly of MHC class I and class II restricted epitopes of CyaA)

### E.2 Immunogenicity of New Leads Consisting in Btpr_{—}163, BTpr_{—}164, BTpr_{—}165, BTpr_{—}166, BTpr_{—}167, BTpr_{—}168, BTpr_{—}173 and BTpr_{—}175

[0388] The immunogenicity of new leads consisting in Btpr_{—}163, BTpr_{—}164, BTpr_{—}165, BTpr_{—}166, BTpr_{—}167, BTpr_{—}168, BTpr_{—}173 and BTpr_{—}175, was further investigated in C57BL/6 mice.

[0389] Mice were vaccinated intradermally either with the placebo or with each lead, respectively. All groups were adjuvanted with poly-ICLC.

[0390] 7 days after vaccination mice were euthanized and splenocytes were restimulated with peptide libraries of each E7 antigen tested. All tested leads were immunogenic.

[0391] Immunogenicity against HPV31, 45 and 58 was not tested in C57BL/6 mice because the tools were not adapted (the genetic background of the mice was not suitable). Immunogenicity against these E7 proteins is tested in other strains of mice as described in the Material and Method.

TABLE 8
Immunogenicity of tested leads in C57BL/6 mice

| | | | Immuno- | |
|---|---|---|---|---|
| | | | genicity | HPV Type with |
| | | | Yes/No | E7-specific |
| | | | (IFN-γ | T cell |
| Protein | HPV types in | gtCyaA | ELISpot | responses |
| code | the insert | deletion | assay) | measured |
| Btpr_163 | 16, 18, 45, 33 E7 | 93 | Yes | 16, 18, 33 |
| | proteins deleted of | | | |
| | the acidic region | | | |
| Btpr_164 | 16, 18, 45, 58 E7 | 93 | Yes | 16, 18 |
| | proteins deleted of | | | |
| | the acidic region | | | |
| Btpr_165 | 31, 52, 58 E7 proteins | 93 | Yes | 52 |
| | full length | | | |
| Btpr_166 | 31, 33, 52 E7 proteins | 93 | Yes | 33, 52 |
| | full length | | | |
| Btpr_167 | 16, 18, 45, 33 E7 | 93 | Yes | 16, 18, 33 |
| | proteins full length | | | |
| Btpr_168 | 16, 18, 45, 58 E7 | 93 | Yes | 16, 18 |
| | proteins full length | | | |
| Btpr_173 | 31, 52, 58 E7 proteins | 203 | Yes | 52 |
| | full length region | | | |
| Btpr_175 | 16, 18, 45, 33 E7 | 203 | Yes | 16, 18, 33 |
| | proteins full length | | | |

These results showed that:
[0392] The immunisation with 10 μg of each lead induced a specific IFN-□response.
[0393] gtCyaAd93 and gtCyaAd203 delivered correctly the antigens to the antigen presenting cells.
[0394] Specific immune responses against HPV16, 18, 33 and 52 E7 proteins were measured.
   These results allowed further investigation of the immune response against hexavalent and heptavalent mixes.

### E.3: Immunogenicity of an Hexavalent Candidate Vaccine.

[0395] The immune response of an hexavalent mix of two trivalent leads, was evaluated in C57BL/6 mice. These leads were BTpr_{—}114 and BTpr_{—}165 containing respectively HPV 16-18-45, E7 proteins and HPV 31-52-58 E7 proteins. The same protocol was used as previously described. As there is no known MHCI restricted peptide identified for HPV52 E7 in mice at the time of the experiment, splenocytes were restimulated with an HPV52 E7-peptide library divided in three sub-pools (221-1, 221-2 and 221-3). For HPV16E7 and HPV18E7 restimulations, peptide libraries were also used divided in 3 sub-pools (116-1, 116-II, 116-III and 171-I, 171-II and 171-3 respectively).

The results are shown on FIG. 15.
These results confirm that:
[0396] The immunisation with 10 μg of the hexavalent mix induced HPV16 E7, HPV18 E7 and HPV52 T cell responses as measured by IFN-□ELISpot.
[0397] Each gtCyaAd93 with its respective antigens was able to deliver them into the antigen presenting cell (APC) and to promote antigen-specific T cell responses against measurable HPV types.
[0398] No differences were observed between trivalent components alone in the frequency of E7-specific T cells responses and the hexavalent candidate vaccine. (data not shown)
   These observations allowed concluding that Poly-ICLC-adjuvanted Btpr_{—}114 and Btpr_{—}165 are efficient at inducing HPV16 E7, HPV18E7 and HPV52 E7-specific T cell responses in C57BL/6 mice after intradermal immunization.

### E.4. Immunogenicity of Two Heptavalent Candidate Vaccines

[0399] Based on productivity and purity results, two heptavalent combinations were tested in C57BL/6 mice: Btpr_{—}165+Btpr_{—}163 and Btpr_{—}166+Btpr_{—}164. Mice were immunized intradermally with 10 μg of each heptavalent candidate vaccine, respectively.
As presented in FIG. 16, these results indicate that for:
[0400] HPV16 E7: the in vitro restimulation with #116-2j (c+d) peptides sub-pool, was able to re-stimulate T-cells elicited by vaccination with both heptavalant candidate vaccines or their components alone harbouring HPV16E7.
[0401] HPV18 E7: the in vitro restimulation with #171-I and #171-II peptides sub-pools were able to re-stimulate T-cells elicited by vaccination with both heptavalant candidate vaccines and their components alone harbouring HPV18E7.
[0402] HPV33 E7:
   [0403] For the heptavalent candidate vaccine composed of Btpr_{—}166 and Btpr_{—}164, the in vitro restimulation with the #220-2 peptide sub-pool, was able to re-stimulate T-cells elicited by vaccination.
   [0404] For the heptavalent candidate vaccine composed of Btpr_{—}165 and Btpr_{—}163, the in vitro restimulation with #220-1, #220-2 and #220-3 peptide sub-pools were able to re-stimulate T-cells elicited by vaccination.
[0405] HPV52 E7: the in vitro restimulation #221-2 and #221-3 peptides sub-pool were able to re-stimulate T-cells elicited by vaccination with both heptavalant candidate vaccines or their components alone that harbour HPV52 E7.
   Together, these results of production and immunogenicity indicate that:
[0406] Recombinant gtCyaAd93 with 3 and 4 HPV E7 proteins can be produced and purified with a good productivity;
[0407] Recombinant gtCyaAd203 proteins can also be produced and purified but with a productivity that is inferior to gtCyaAd93 vectors containing the same antigens.
[0408] Two recombinant gtCyaAd93 with 3 and 4 HPV E7 proteins can correctly deliver their antigens to APCs.
[0409] A specific immune response is measured against each immunogenic HPV type in C57BL/6 mice
[0410] The design of the E7 proteins with a recombinant gtCyaAd93 may have an impact on the immune response against E7 antigens e.g. as illustrated with HPV33 E7.
[0411] Antigens with a complex structure (21 cysteins) and acidic charges are correctly delivered by gtCyaAd93 and processed by Antigen Presenting cells (APC). This is unexpected taking into consideration results from Gmira et al. 2001, and Fayolle et al., 1998.

### F. Cytotoxic Efficiency of Candidates

[0412] F.1 CD8-Mediated Cytotoxic Efficiency of Trivalent Candidate Vaccines

[0413] In order to compare the efficiency of the trivalent candidates in cytotoxicity induction, in vivo killing assays were performed with and without adjuvant. Splenocytes from naive mice were collected and loaded with peptide libraries from HPV16, HPV18 and HPV45 E7 proteins, respectively.

[0414] 4 groups of mice were vaccinated with a placebo, with gtCyaAd93-pep216-CyaCopt, with gtCyaAd93-pep217-CyaCopt and with gtCyaAd203-pep217-CyaCopt in the presence or not of poly IC-LC, respectively.

[0415] In the presence of adjuvant, no difference was observed between candidates (data not shown). In the left panel of FIG. 12 (loading with libraries #171-1 and #171-2), the percentage of killing is superior in mice vaccinated with the chimeric protein containing the full length antigens (pep217) as compared to mice vaccinated with the chimeric protein containing the deleted antigen pep216. Similarly, in the right panel of FIG. 12 (loading with peptide library #218-3), the percentage of killing is superior in mice vaccinated with the chimeric protein containing pep217 while no killing is observed in mice vaccinated with the chimeric protein containing pep216 when compared to the placebo. Without poly-LCLC adjuvant, gtCyaAs harbouring full length antigens were more efficient in killing their target cells as compared to the antigens deleted for this acid domain. This is unexpected as full length antigens contain the E7 acidic domains and according to the teaching of the literature should be less efficient than antigens deleted for this acid domain.

[0416] These results indicate that
[0417] the full length antigens probably have epitopes (helper T-cell epitopes) that favour the killing response by CD8⁺ T lymphocytes; and
[0418] the gtCyaA vectors allow the delivery of antigens with acidic regions

[0419] F.2 CD8-Mediated Cytotoxic Efficiency of Heptavalent Candidate Vaccines

[0420] In order to compare the efficiency of the heptavalent candidate vaccines in their ability to induce E7-specific cytotoxic T lymphocytes (CTL), in vivo killing assays were performed with adjuvant. Splenocytes from naïve mice were collected and loaded with peptide libraries from HPV16 and HPV18 E7 proteins, respectively.

[0421] 3 groups of mice were vaccinated with a placebo, with BTpr165+BTpr163 and BTpr166+BTpr164 in the presence of Poly-ICLC, respectively.

[0422] No E7-specific killing was observed in the placebo group. Both heptavalent candidate vaccines induced E7-specific killing of cells loaded respectively with HPV16 E7 peptide library (FIG. 17-A) or HPV18 E7 peptide library (FIG. 17-B).

[0423] These results indicate that both heptavalent candidates induce functional HPV16 and HPV18 E7-specific CTL.

### G. Tumour Regression Assays in Mice Bearing TC-1 Tumours

[0424] We further investigated the therapeutic efficiency of the four trivalent candidates Btpr_{—}114 (gtCyaAd93-PEP216-CyaCopt), BTpr_{—}115 (gtCyaAd93-pep217-CyaCopt), BTpr_{—}116 (gtCyaAd203-pep216-CyaCopt) and BTpr_{—}117 (gtCyaAd203-pep217-CyaCopt) using the TC-1 tumour cell model.

[0425] Mice were all inoculated with TC-1 cells (expressing HPV16 E7 antigen) at day 0. Group 1 was left untreated. Group 2 was treated with PBS and Poly-ICLC, group 3 was treated with ProCervix adjuvanted with Poly-ICLC, group 4 was treated with gtCyaAd93-pep216 adjuvanted with Poly-ICLC, group 5 with gtCyaAd203-pep216 adjuvanted with polyIC-LC, group 6 with gtCyaAd93-pep217 adjuvanted with Poly-ICLC and group 7 with gtCyaAd203-pep217 adjuvanted with Poly-ICLC. Each group was composed of 10 mice.

[0426] FIG. 13 shows that all mice developed tumours. However, mice vaccinated with a CyaA candidate vaccine embedding the HPV16 E7 antigen and adjuvanted with Poly-ICLC displayed a strong tumour clearance rate at day 65: 9 out of 10 mice treated with ProCervix+Poly-ICLC cleared tumours (group 3); 9 out of 10 mice treated with gtCyaAd93-pep216+Poly-ICLC regressed tumours (group 4); 8 out of 10 mice vaccinated with gtCyaAd203-pep216+Poly-ICLC regressed tumours (group 5); 9 out of 10 mice treated with gtCyaAd93-pep217+Poly-ICLC regressed tumours (group 6); 9 out of 10 mice vaccinated with gtCyaAd203-pep217+Poly-ICLC regressed tumours (group 7). 0 out of 10 and 1 out of 10 mice untreated or treated with the placebo+Poly-ICLC regressed tumours respectively (group 1 and group 2). Thus, only mice that were vaccinated with a candidate vaccine containing the HPV16 E7 antigen were able to regress tumours significantly. Between the four vaccine candidates, no difference was observed in their capacity to regress tumours.

[0427] These results show that administration of chimeric proteins of the invention, such as Btpr_{—}114 (gtCyaAd93-PEP216-CyaCopt), BTpr_{—}115 (gtCyaAd93-pep217-CyaCopt), BTpr_{—}116 (gtCyaAd203-pep216-CyaCopt) and BTpr_{—}117 (gtCyaAd203-pep217-CyaCopt) enables to efficiently regress tumours provoking oncogenic disorders.

### H. Therapeutic and Prophylactic Effect of Trivalent Candidates

[0428] The capacity of vaccinated mice to be protected against the development and growth of a tumour, following eradication of a first tumour expressing a different antigen was further evaluated. LL2 tumour cells expressing HPV18 E7 antigen and the control cell line LL2-GFP were inoculated on the flank of the surviving vaccinated mice, which have previously fully regressed the TC-1 grafted tumours (expressing HPV16 E7 antigen).

[0429] Each group of surviving mice was divided in two sub-groups that were inoculated either with LL2-HPV18 E7 cells or LL2-GFP cells. Results are shown in FIG. 14.

[0430] Mice vaccinated with a gtCyaA candidate vaccine embedding the HPV18 E7 antigen and adjuvanted with Poly-ICLC displayed a strong protective effect against the growth of LL2-HPV18 E7 cell line (no mice developed tumour in groups 3b, 4b, 5b, 6b and 7b) but not against the growth of LL2-GFP cell line (all mice developed tumours in groups 3a, 4a, 5a, 6a and 7a).

[0431] Together, these results highlight that mice vaccinated with the trivalent candidates, which have eliminated TC-1 tumours, were also protected against the LL2-HPV18E7 tumours and indicates that said vaccinated mice, which have developed a curative antigen-specific T cell response against HPV16 E7 antigen, have also developed a protective antigen specific T-cell response against HPV18 E7 antigen

### BIBLIOGRAPHY

[0432] [1] Ladant D, Glaser P, Ullmann A. Insertional mutagenesis of Bordetella pertussis adenylate cyclase. J Biol Chem 1992; 267: 2244-50.
[0433] [2] Sebo P, Fayolle C, d'Andria O, Ladant D, Leclerc C, Ullmann A. Cell-invasive activity of epitope-tagged adenylate cyclase of Bordetella pertussis allows in vitro presentation of a foreign epitope to CD8+ cytotoxic T cells. Infect Immun 1995; 63: 3851-7.
[0434] [3] Dadaglio G, Moukrim Z, Lo-Man R, Sheshko V, Sebo P, Leclerc C. Induction of a polarized Th1 response by insertion of multiple copies of a viral T-cell epitope into adenylate cyclase of Bordetella pertussis. Infect Immun 2000; 68: 3867-72.
[0435] [4] Fayolle C, Ladant D, Karimova G, Ullmann A, Leclerc C. Therapy of murine tumours with recombinant Bordetella pertussis adenylate cyclase carrying a cytotoxic T cell epitope. J Immunol 1999; 162: 4157-62.
[0436] [5] Preville X, Ladant D, Timmerman B, Leclerc C. Eradication of established tumours by vaccination with recombinant Bordetella pertussis adenylate cyclase carrying the human papillomavirus 16 E7 oncoprotein. Cancer Res 2005; 65: 641-9.
[0437] [6] Berraondo P, Nouze C, Preville X, Ladant D, Leclerc C. Eradication of large tumours in mice by a tritherapy targeting the innate, adaptive, and regulatory components of the immune system. Cancer Res 2007; 67: 8847-55.
[0438] [7] Karimova G, Fayolle C, Gmira S, Ullmann A, Leclerc C, Ladant D. Charge-dependent translocation of Bordetella pertussis adenylate cyclase toxin into eukaryotic cells: implication for the in vivo delivery of CD8(+) T cell epitopes into antigen-presenting cells. Proc Natl Acad Sci USA 1998; 95: 12532-7.
[0439] [8] Gmira S, Karimova G, Ladant D. Characterization of recombinant Bordetella pertussis adenylate cyclase toxins carrying passenger proteins. Res Microbiol 2001; 152: 889-900.
[0440] [9] de Sanjose S et al. Human papillomavirus genotype attribution in invasive cervical cancer: a retrospective cross-sectional worldwide study. Lancet Oncol 201011: 1048-56.
[0441] [10] Bruni L, Diaz M, Castellsague X, Ferrer E, Bosch F X, de Sanjose S. Cervical human papillomavirus prevalence in 5 continents: meta-analysis of 1 million women with normal cytological findings. J Infect Dis 2010 202: 1789-99.
[0442] [11] Morandell D, Rostek U, Bouvard V, Campo-Fernandez B, Fiedler M, Jansen-Durr P, Zwerschke W. Human papillomavirus type 45 E7 is a transforming protein inducing retinoblastoma protein degradation and anchorage-independent cell cycle progression. Virology 2008; 379: 20-9.
[0443] [12] Liu X, Clements A, Zhao K, Marmorstein R. Structure of the human Papillomavirus E7 oncoprotein and its mechanism for inactivation of the retinoblastoma tumour suppressor. J Biol Chem 2006; 281: 578-86.
[0444] [13] Liu S, Tian Y, Greenaway F T, Sun M Z. A C-terminal hydrophobic, solvent-protected core and a flexible N-terminus are potentially required for human papillomavirus 18 E7 protein functionality. Biochimie 2010 92: 901-8.
[0445] [14] El-Azami-El-Idrissi M, Bauche C, Loucka J, Osicka R, Sebo P, Ladant D, Leclerc C. Interaction of Bordetella pertussis adenylate cyclase with CD11b/CD18: Role of toxin acylation and identification of the main integrin interaction domain. J Biol Chem 2003; 278: 38514-21.
[0446] [15] Glaser P, Elmaoglou-Lazaridou A, Krin E, Ladant D, Barzu O, Danchin A. Identification of residues essential for catalysis and binding of calmodulin in Bordetella pertussis adenylate cyclase by site-directed mutagenesis. EMBO J 1989; 8: 967-72.
[0447] [16] Glaser P, Munier H, Gilles A M, Krin E, Porumb T, Barzu O, Sarfati R, Pellecuer C, Danchin A. Functional consequences of single amino acid substitutions in calmodulin-activated adenylate cyclase of Bordetella pertussis. EMBO J 1991; 10: 1683-8.
[0448] [17] De Villiers E M, Fauquet C, Broker T R, Bernard H U, & zur Hausen H (2004) Virology 324, 17-27
[0449] [18] Khafizov et al. A study of the evolution of inverted-topology repeats from LeuT-fold transporters using AlignMe. Biochemistry, 2010, 49; 10702-10713
[0450] [19] Lin K Y, Guarnieri F G, Staveley-O'Carroll K F, Levitsky H I, August J T, Pardoll D M, Wu T C. Treatment of established tumors with a novel vaccine that enhances major histocompatibility class II presentation of tumor antigen. Cancer Res 1996; 56: 21-6
[0451] [20] Bertram J S, Janik P. Establishment of a cloned line of Lewis Lung Carcinoma cells adapted to cell culture. Cancer Lett 1980; 11: 63-73.
[0452] [21] Savai R, Schermuly R T, Pullamsetti S S, Schneider M, Greschus S, Ghofrani H A, Traupe H, Grimminger F, Banat G A. A combination hybrid-based vaccination/adoptive cellular therapy to prevent tumor growth by involvement of T cells. Cancer Res 2007; 67: 5443-53.
[0453] [22] Barchet W, Oehen S, Klenerman P, Wodarz D, Bocharov G, Lloyd A L, Nowak M A, Hengartner H, Zinkernagel R M, Ehl S. Direct quantitation of rapid elimination of viral antigen-positive lymphocytes by antiviral CD8(+) T cells in vivo. Eur J Immunol 2000; 30: 1356-63.
[0454] [23] Ingulli E. Tracing tolerance and immunity in vivo by CFSE-labeling of administered cells. Methods Mol Biol 2007; 380: 365-76.
[0455] [24] Barber D L, Wherry E J, Ahmed R. Cutting edge: rapid in vivo killing by memory CD8 T cells. J Immunol 2003; 171: 27-31.
[0456] [25] Holubova et al. Delivery of large heterologous polypeptides across the cytoplasmic membrane of antigen-presenting cells by the Bordetella RTX hemolysin moiety lacking the adenylyl cyclase domain. Infect Immun. 2012 March; 80(3):1181-92.

1. A polypeptide, comprising or consisting of, from N-terminal to C terminal, (i) the C-terminal part of the E7 protein of a first HPV type, the C-terminal part of the E7 protein of a second HPV type, the C-terminal part of the E7 protein of a third HPV type, optionally the C-terminal part of the E7 protein of a fourth HPV type, and (ii) the N-terminal part of the E7 protein of said first HPV type, the N-terminal part of the E7 protein of said second HPV type, the N-terminal part of the E7 protein of said third HPV type, and optionally the N-terminal part of the E7 protein of said fourth HPV type; preferably a polypeptide comprising or consisting of the sequences as set forth in SEQ ID NO: 34, 36, 38, 40, 42, 44, 46, 48, 50, 52, 54 or 56.

2. A chimeric protein comprising or consisting of, from N-terminal to C-terminal:
(a) a fragment of the Bordetella pertussis CyaA protein as set forth in SEQ ID NO: 2, the sequence of said fragment beginning with the first residue of SEQ ID NO:2 and ending with a residue located from position 183 to position 227 of SEQ ID NO:2, or a variant with at least 95% similarity with this fragment;
(b) a heterologous polypeptide comprising at least 3 HPV antigens, each HPV antigen originating from a different HPV type; and
(c) a fragment of the Bordetella pertussis CyaA protein as set forth in SEQ ID NO: 2, the sequence of said fragment beginning with a residue located from position 321 to position 387 of SEQ ID NO:2 and ending with the last residue of SEQ ID NO:2, or a variant with at least 95% similarity with this fragment.

3. A chimeric protein according to claim 2, selected from the group consisting of:
1) a protein comprising or consisting of, from N-terminal to C-terminal, (a) a fragment consisting of residues 1 to 227 of SEQ ID NO:2, 4 or 6, (b) a heterologous polypeptide comprising at least 3 HPV antigens, each HPV antigen originating from a different HPV type; and (c) a fragment consisting of residues 321 to 1706 of SEQ ID NO:2, 4 or 6;
2) a protein comprising or consisting of, from N-terminal to C-terminal, (a) a fragment consisting of residues 1 to 227 of SEQ ID NO:8, (b) a heterologous polypeptide comprising at least 3 HPV antigens, each HPV antigen originating from a different HPV type; and (c) a fragment consisting of residues 321 to 1705 of SEQ ID NO:8;
3) a protein comprising or consisting of, from N-terminal to C-terminal, (a) a fragment consisting of residues 1 to 183 of SEQ ID NO:2, 4 or 6, (b) a heterologous polypeptide comprising at least 3 HPV antigens, each HPV antigen originating from a different HPV type; and (c) a fragment consisting of residues 387 to 1706 of SEQ ID NO:2, 4 or 6;
4) a protein comprising or consisting of, from N-terminal to C-terminal, (a) a fragment consisting of residues 1 to 183 of SEQ ID NO:8, (b) a heterologous polypeptide comprising at least 3 HPV antigens, each HPV antigen originating from a different HPV type; and (c) a fragment consisting of residues 387 to 1705 of SEQ ID NO:8;
5) from N-terminal to C-terminal, (a) a fragment consisting of residues 1 to 227 of SEQ ID NO:2, 4 or 6, (b) a heterologous polypeptide comprising at least 3 HPV antigens, each HPV antigen originating from a different HPV type; and (c) a fragment consisting of residues 387 to 1706 of SEQ ID NO:2, 4 or 6;
6) a protein comprising or consisting of, from N-terminal to C-terminal, (a) a fragment consisting of residues 1 to 227 of SEQ ID NO:8, (b) a heterologous polypeptide comprising at least 3 HPV antigens, each HPV antigen originating from a different HPV type; and (c) a fragment consisting of residues 387 to 1705 of SEQ ID NO:8;
7) a protein comprising or consisting of, from N-terminal to C-terminal, (a) a fragment consisting of residues 1 to 183 of SEQ ID NO:2, 4 or 6, (b) a heterologous polypeptide comprising at least 3 HPV antigens, each HPV antigen originating from a different HPV type; and (c) a fragment consisting of residues 321 to 1706 of SEQ ID NO:2, 4 or 6; and
8) a protein comprising or consisting of, from N-terminal to C-terminal, (a) a fragment consisting of residues 1 to 183 of SEQ ID NO:8, (b) a heterologous polypeptide comprising at least 3 HPV antigens, each HPV antigen originating from a different HPV type; and (c) a fragment consisting of residues 321 to 1705 of SEQ ID NO:8.

4. The chimeric protein according to claim 2, wherein said antigen is the E7 protein of a HPV type or a fragment of this E7 protein.

5. The chimeric protein according to claim 2, wherein said heterologous polypeptide comprises or consists of at least 3 fragments of an E7 protein of a HPV type, at least 3 of these fragments originating from E7 proteins of different HPV types.

6. The chimeric protein according to claim 2, wherein said heterologous polypeptide comprises or consists of at least 4 fragments of the E7 protein, at least 3 of these fragments originating from E7 proteins of different HPV types, and at least 2 of these fragments originating from the same E7 protein of a HPV type.

7. The chimeric protein according to claim 2, wherein said heterologous polypeptide comprises or consists of, from N-terminal to C terminal, the C-terminal part of the E7 protein of a first HPV type, the C-terminal part of the E7 protein of a second HPV type, the C-terminal part of the E7 protein of a third HPV type, optionally the C-terminal part of the E7 protein of a fourth HPV type, the N-terminal part of the E7 protein of said first HPV type, the N-terminal part of the E7 protein of said second HPV type, the N-terminal part of the E7 protein of said third HPV type, and optionally the N-terminal part of the E7 protein of said fourth HPV type.

8. The chimeric protein according to claim 2, wherein said HPV types, preferably said first, second, third and, optionally fourth, HPV types are selected among HPV16, HVP18, HPV31, HPV33, HPV45, HPV52 and HPV58 types.

9. The chimeric protein according to claim 2, wherein said heterologous polypeptide comprises or consists of a sequence as set forth in SEQ ID NO: 34, 36, 38, 40, 42, 44, 46, 48, 50, 52, 54 or 56.

10. The chimeric protein according to claim 2, the sequence of which is as set forth in SEQ ID NO: 58, 61, 64 or 67.

11. A polynucleotide encoding the chimeric protein of claim 2, preferably comprising or consisting of a sequence as set forth in SEQ ID NO: 57, 60, 63 or 66.

12. A vector, preferably a plasmid, comprising a polynucleotide according to claim 11 and expression control sequences, and optionally further comprising the cyaC nucleotide coding sequence of a Bordetella strain, and preferably consisting of a sequence as set forth in SEQ ID NO:59, 62, 65 or 68.

13. A cell culture, preferably an E. coli strain culture, comprising a polynucleotide according to claim 11 or a vector according to claim 12.

14. A composition comprising at least one chimeric protein(s), preferably two different chimeric proteins, according to claim 2 and a suitable pharmaceutical vehicle, and optionally at least one adjuvant.

15. A composition according to claim 14, comprising (a) a chimeric protein, the heterologous polypeptide of which comprises or consists of, from N-terminal to C terminal, the C-terminal part of the E7 protein of a first HPV type, the C-terminal part of the E7 protein of a second HPV type, the C-terminal part of the E7 protein of a third HPV type, the N-terminal part of the E7 protein of said first HPV type, the N-terminal part of the E7 protein of said second HPV type and the N-terminal part of the E7 protein of said third HPV type, and (b) a chimeric protein, the heterologous polypeptide of which comprises or consists of, from N-terminal to C terminal, the C-terminal part of the E7 protein of a fourth HPV type, the C-terminal part of the E7 protein of a fifth HPV type, the C-terminal part of the E7 protein of a sixth HPV type, the N-terminal part of the E7 protein of said fourth HPV type, the N-terminal part of the E7 protein of said fifth HPV type and the N-terminal part of the E7 protein of said sixth type, wherein said first, second, third, fourth, fifth and sixth HPV types are (a) chosen among HPV16, HPV18, HPV45, HPV31, HPV52 and HPV58 or (b) chosen among HPV16, HPV18 and HPV45, HPV31, HPV33 and HPV52.

16. A composition according to claim 14, comprising (a) a chimeric protein, the heterologous polypeptide of which comprises or consists of, from N-terminal to C terminal, the C-terminal part of the E7 protein of a first HPV type, the C-terminal part of the E7 protein of a second HPV type, the C-terminal part of the E7 protein of a third HPV type, the C-terminal part of the E7 protein of a fourth HPV type, the N-terminal part of the E7 protein of said first HPV type, the N-terminal part of the E7 protein of said second HPV type, the N-terminal part of the E7 protein of said third HPV type and the N-terminal part of the E7 protein of said fourth HPV type, and (b) a chimeric protein, the heterologous polypeptide of which comprises or consists of, from N-terminal to C terminal, the C-terminal part of the E7 protein of fifth a HPV type, the C-terminal part of the E7 protein of a sixth HPV type, the C-terminal part of the E7 protein of a seventh HPV type, the N-terminal part of the E7 protein of said fifth HPV type, the N-terminal part of the E7 protein of said sixth HPV type and the N-terminal part of the E7 protein of said seventh type, wherein the first, second, third, fourth, fifth, sixth and seventh HPV types are selected from the group consisting of (a) HPV31, HPV33, HPV52, HPV58, HPV16, HPV18 and HPV45, (b) HPV16, HPV18, HPV33, HPV45, HPV31, HPV52 and HPV58, (c) HPV16, HPV18, HPV45, HPV58, HPV31, HPV52 and HPV33, (d) HPV16, HPV18, HPV33, HPV45, HPV31, HPV58 and HPV52, (e) HPV16, HPV18, HPV45, HPV58, HPV31, HPV33 and HPV52, and (f) HPV16, HPV18, HPV45, HPV33, HPV31, HPV52 and HPV58.

17. A medicament comprising a chimeric protein according to claim 2.

18. A method for prophylaxis or treatment of a pathogenic infection or oncogenic disorder which comprises administering to a patient in need thereof the chimeric protein according to claim 2.

19. A method which comprises (i) immunotherapeutically treating a first determined pathological condition(s) diagnosed in a mammalian host by eliciting a T cell immune response against a first group of epitopes contained in the heterologous polypeptide of the chimeric protein according to claim 2 and (ii) prophylactically treating a second determined pathological condition(s) in the same mammalian host by eliciting a T cell memory immune response against a second group of epitopes contained in said heterologous polypeptide, said immune responses being obtained after administration of said chimeric protein or said composition into said host, wherein said prophylaxis against second determined pathological condition(s) is not observed when said second group of epitopes is not contained in said heterologous polypeptide.

20. The chimeric protein according to claim 3, wherein said antigen is the E7 protein of a HPV type or a fragment of this E7 protein.

The application's sequence listing, which the Patent Office published only in electronic form, follows.

SEQUENCE LISTING (98 sequences)

SEQ ID NO: 1 - DNA, 5121 bp, Bordetella pertussis (wild type CyaA)
  CDS (1)..(5121)
atgcagcaatcgcatcaggctggttacgcaaacgccgccgaccgggagtctggcatccccgcagccgtactcgatggcatcaaggccgtggcgaaggaaaaaaacgccacattgatgttccgcctggtcaacccccattccaccagcctgattgccgaaggggtggccaccaaaggattgggcgtgcacgccaagtcgtccgattgggggttgcaggcgggctacattcccgtcaacccgaatctttccaaactgttcggccgtgcgcccgaggtgatcgcgcgggccgacaacgacgtcaacagcagcctggcgcatggccataccgcggtcgacctgacgctgtcgaaagagcggcttgactatctgcggcaagcgggcctggtcaccggcatggccgatggcgtggtcgcgagcaaccacgcaggctacgagcagttcgagtttcgcgtgaaggaaacctcggacgggcgctatgccgtgcagtatcgccgcaagggcggcgacgatttcgaggcggtcaaggtgatcggcaatgccgccggtattccactgacggcggatatcgacatgttcgccattatgccgcatctgtccaacttccgcgactcggcgcgcagttcggtgaccagcggcgattcggtgaccgattacctggcgcgcacgcggcgggccgccagcgaggccacgggcggcctggatcgcgaacgcatcgacttgttgtggaaaatcgctcgcgccggcgcccgttccgcagtgggcaccgaggcgcgtcgccagttccgctacgacggcgacatgaatatcggcgtgatcaccgatttcgagctggaagtgcgcaatgcgctgaacaggcgggcgcacgccgtcggcgcgcaggacgtggtccagcatggcactgagcagaacaatcctttcccggaggcagatgagaagattttcgtcgtatcggccaccggtgaaagccagatgctcacgcgcgggcaactgaaggaatacattggccagcagcgcggcgagggctatgtcttctacgagaaccgtgcatacggcgtggcggggaaaagcctgttcgacgatgggctgggagccgcgcccggcgtgccgagcggacgttcgaagttctcgccggatgtactggaaacggtgccggcgtcacccggattgcggcggccgtcgctgggcgcagtggaacgccaggattccggctatgacagccttgatggggtgggatcgcgatcgttctcgttgggcgaggtgtccgacatggccgccgtggaagcggcggaactggaaatgacccggcaagtcttgcacgccggggcgcggcaggacgatgccgagccgggcgtgagcggtgcgtcggcgcactgggggcagcgggcgctgcagggcgcccaggcggtggcggcggcgcagcggctggttcatgccattgccctgatgacgcaattcggccgggccggttccaccaacacgccgcaggaagcggcctcgttgtcggcggccgtgttcggcttgggcgaggccagcagcgccgtggccgaaaccgtgagcggttttttccgcgggtcttcgcgctgggccggcggtttcggcgtggctggcggcgcgatggcgctgggaggcggcatcgccgcggccgttggcgccgggatgtcgttgaccgatgacgcgccggccggacagaaggccgccgccggcgccgagatcgcgctgcagttgacaggtggaacggtcgagctggcttcttccatcgcgttggcgctggccgcggcgcgcggcgtgaccagcggcttgcaggtggccggggcgtcggccggggcggctgccggcgcattggccgcggcgctcagtcccatggagatctacggcctggtgcagcaatcgcactatgcggatcagctggacaagctggcgcaggaatcgagcgcatacggttacgagggcgacgccttgctggcccagctgtatcgcgacaagacggccgccgagggcgccgtcgccggcgtctccgccgtcctgagcacggtgggggcggcggtgtcgatcgccgcggcggccagcgtggtaggggccccggtggcggtggtcacttccttgctgaccggggctctcaacggcatcctgcgcggcgtgcagcagcccatcatcgaaaagctggccaacgattacgctcgcaagatcgacgagctgggcgggccgcaagcgtacttcgagaaaaacctgcaggcgcgtcacgaacaactggccaattcggacggcctacggaaaatgctggccgacctgcaggccggttggaacgccagcagcgtgatcggggtgcagacgacagagatctccaagtcggcgctcgaactggccgccattaccggcaacgcggacaacctgaaatccgtcgacgtgttcgtggaccgcttcgtccagggcgagcgggtggccggccagccggtggtcctcgacgtcgccgccggcggcatcgatatcgccagccgcaagggcgagcggccggcgctgacgttcatcacgccgctggccgcgccaggagaagagcagcgccggcgcacgaaaacgggcaagagcgaattcaccacattcgtcgagatcgtgggcaagcaggaccgctggcgcatccgggacggcgcggccgacaccaccatcgatctggccaaggtggtgtcgcaactggtcgacgccaatggcgtgctcaagcacagcatcaaactggatgtgatcggcggagatggcgatgacgtcgtgcttgccaatgcttcgcgcatccattatgacggcggcgcgggcaccaacacggtcagctatgccgccctgggtcgacaggattccattaccgtgtccgccgacggggaacgtttcaacgtgcgcaagcagttgaacaacgccaacgtgtatcgcgaaggcgtggctacccagacaaccgcctacggcaagcgcacggagaatgtccaataccgccatgtcgagctggcccgtgtcgggcaactggtggaggtcgacacgctcgagcatgtgcagcacatcatcggcggggccggcaacgattcgatcaccggcaatgcgcacgacaacttcctagccggcgggtcgggcgacgacaggctggatggcggcgccggcaacgacaccctggttggcggcgagggccaaaacacggtcatcggcggcgccggcgacgacgtattcctgcaggacctgggggtatggagcaaccagctcgatggcggcgcgggcgtcgataccgtgaagtacaacgtgcaccagccttccgaggagcgcctcgaacgcatgggcgacacgggcatccatgccgatcttcaaaagggcacggtcgagaagtggccggccctgaacctgttcagcgtcgaccatgtcaagaatatcgagaatctgcacggctcccgcctgaacgaccgcatcgccggcgacgaccaggacaacgagctctggggccacgatggcaacgacacgatacgcggccggggcggcgacgacatcctgcgcggcggcctgggcctggacacgctgtatggcgaggacggcaacgacatcttcctgcaggacgacgagaccgtcagcgatgacatcgacggcggcgcggggctggacaccgtcgactactccgccatgatccatccaggcaggatcgttgcgccgcatgaatacggcttcgggatcgaggcggacctgtccagggaatgggtgcgcaaggcgtccgcgctgggcgtggactattacgataatgtccgcaatgtcgaaaacgtcatcggtacgagcatgaaggatgtgctcatcggcgacgcgcaagccaataccctgatgggccagggcggcgacgataccgtgcgcggcggcgacggcgatgatctgctgttcggcggcgacggcaacgacatgctgtatggcgacgccggcaacgacaccctctacggggggctgggcgacgatacccttgaaggcggcgcgggcaacgattggttcggccagacgcaggcgcgcgagcatgacgtgctgcgcggcggagatggggtggataccgtcgattacagccagaccggcgcgcatgccggcattgccgcgggtcgcatcgggctgggcatcctggctgacctgggcgccggccgcgtcgacaagctgggcgaggccggcagcagcgcctacgatacggtttccggtatcgagaacgtggtgggcacggaactggccgaccgcatcacgggcgatgcgcaggccaacgtgctgcgcggcgcgggtggcgccgacgtgcttgcgggcggcgagggcgacgatgtgctgctgggcggcgacggcgacgaccagctgtcgggcgacgccggacgcgatcgcttgtacggcgaagccggtgacgactggttcttccaggatgccgccaatgccggcaatctgctcgacggcggcgacggccgcgataccgtggatttcagcggcccgggccggggcctcgacgccggcgcaaagggcgtattcctgagcttgggcaaggggttcgccagcctgatggacgaacccgaaaccagcaacgtgttgcgcaatatcgagaacgccgtgggcagcgcgcgtgatgacgtgctgatcggcgacgcaggcgccaacgtcctcaatggcctggcgggcaacgacgtgctgtccggcggcgctggcgacgatgtgctgctgggcgacgagggctcggacctgctcagcggcgatgcgggcaacgacgatctgttcggcgggcagggcgatgatacttatctgttcggggtcgggtacgggcacgacacgatctacgaatcgggcggcggccatgacaccatccgcatcaacgcgggggcggaccagctgtggttcgcgcgccagggcaacgacctggagatccgcattctcggcaccgacgatgcacttaccgtgcacgactggtatcgcgacgccgatcaccgggtggaaatcatccatgccgccaaccaggcggtagaccaggcaggcatcgaaaagctggtcgaggcaatggcgcagtatccggaccccggcgcggcggcggctgccccgccggcggcgcgcgtgccggacacgctgatgcagtccctggctgtcaactggcgctga

SEQ ID NO: 2 - protein, 1706 aa, Bordetella pertussis (wild type CyaA)
MQQSHQAGYANAADRESGIPAAVLDGIKAVAKEKNATLMFRLVNPHSTSLIAEGVATKGLGVHAKSSDWGLQAGYIPVNPNLSKLFGRAPEVIARADNDVNSSLAHGHTAVDLTLSKERLDYLRQAGLVTGMADGVVASNHAGYEQFEFRVKETSDGRYAVQYRRKGGDDFEAVKVIGNAAGIPLTADIDMFAIMPHLSNFRDSARSSVTSGDSVTDYLARTRRAASEATGGLDRERIDLLWKIARAGARSAVGTEARRQFRYDGDMNIGVITDFELEVRNALNRRAHAVGAQDVVQHGTEQNNPFPEADEKIFVVSATGESQMLTRGQLKEYIGQQRGEGYVFYENRAYGVAGKSLFDDGLGAAPGVPSGRSKFSPDVLETVPASPGLRRPSLGAVERQDSGYDSLDGVGSRSFSLGEVSDMAAVEAAELEMTRQVLHAGARQDDAEPGVSGASAHWGQRALQGAQAVAAAQRLVHAIALMTQFGRAGSTNTPQEAASLSAAVFGLGEASSAVAETVSGFFRGSSRWAGGFGVAGGAMALGGGIAAAVGAGMSLTDDAPAGQKAAAGAEIALQLTGGTVELASSIALALAAARGVTSGLQVAGASAGAAAGALAAALSPMEIYGLVQQSHYADQLDKLAQESSAYGYEGDALLAQLYRDKTAAEGAVAGVSAVLSTVGAAVSIAAAASVVGAPVAVVTSLLTGALNGILRGVQQPIIEKLANDYARKIDELGGPQAYFEKNLQARHEQLANSDGLRKMLADLQAGWNASSVIGVQTTEISKSALELAAITGNADNLKSVDVFVDRFVQGERVAGQPVVLDVAAGGIDIASRKGERPALTFITPLAAPGEEQRRRTKTGKSEFTTFVEIVGKQDRWRIRDGAADTTIDLAKVVSQLVDANGVLKHSIKLDVIGGDGDDVVLANASRIHYDGGAGTNTVSYAALGRQDSITVSADGERFNVRKQLNNANVYREGVATQTTAYGKRTENVQYRHVELARVGQLVEVDTLEHVQHIIGGAGNDSITGNAHDNFLAGGSGDDRLDGGAGNDTLVGGEGQNTVIGGAGDDVFLQDLGVWSNQLDGGAGVDTVKYNVHQPSEERLERMGDTGIHADLQKGTVEKWPALNLFSVDHVKNIENLHGSRLNDRIAGDDQDNELWGHDGNDTIRGRGGDDILRGGLGLDTLYGEDGNDIFLQDDETVSDDIDGGAGLDTVDYSAMIHPGRIVAPHEYGFGIEADLSREWVRKASALGVDYYDNVRNVENVIGTSMKDVLIGDAQANTLMGQGGDDTVRGGDGDDLLFGGDGNDMLYGDAGNDTLYGGLGDDTLEGGAGNDWFGQTQAREHDVLRGGDGVDTVDYSQTGAHAGIAAGRIGLGILADLGAGRVDKLGEAGSSAYDTVSGIENVVGTELADRITGDAQANVLRGAGGADVLAGGEGDDVLLGGDGDDQLSGDAGRDRLYGEAGDDWFFQDAANAGNLLDGGDGRDTVDFSGPGRGLDAGAKGVFLSLGKGFASLMDEPETSNVLRNIENAVGSARDDVLIGDAGANVLNGLAGNDVLSGGAGDDVLLGDEGSDLLSGDAGNDDLFGGQGDDTYLFGVGYGHDTIYESGGGHDTIRINAGADQLWFARQGNDLEIRILGTDDALTVHDWYRDADHRVEIIHAANQAVDQAGIEKLVEAMAQYPDPGAAAAAPPAARVPDTLMQSLAVNWR

SEQ ID NO: 3 - DNA, 5121 bp, Bordetella hinzii (wild type CyaA); identical to SEQ ID NO: 1
  CDS (1)..(5121)

SEQ ID NO: 4 - protein, 1706 aa, Bordetella hinzii (wild type CyaA); identical to SEQ ID NO: 2

SEQ ID NO: 5 - DNA, 5121 bp, Bordetella parapertussis (wild type CyaA)
  CDS (1)..(5121)
atgcagcaatcgcatcaggctggttacgcaaacgccgccgaccgggagtctggcatccccgcagccgtactcgatggcatcaaggccgtggcgaaggaaaaaaacgccacattgatgttccgcctggtcaacccccattccaccagcctgattgccgaaggggtggccaccaaaggattgggcgtgcacgccaagtcgtccgattgggggttgcaggcgggctacattcccgtcaacccgaatctttccaaactgttcggccgtgcgcccgaggtgatcgcgcgggccgacaacgacgtcaacagcagcctggcgcatggccataccgcggtcgacctgacgctgtcgaaagagcggcttgactatctgcggcaagcgggcctggtcaccggcatggccgatggcgtggtcgcgagcaaccacgcaggctacgagcagttcgagtttcgcgtgaaggaaacctcggacgggcgctatgccgtgcagtatcgccgcaagggcggcgacgatttcgaggcggtcaaggtgatcggcaatgccgccggtattccactgacggcggatatcgacatgttcgccatcatgccgcatctgtccaacttccgcgactcggcgcgcagttcggtgaccagcggcgattcggtgaccgattacctggcgcgcacgcggcgggccgccagcgaggccacgggcggcctggatcgcgaacgcatcgacttgttgtggaaaatcgctcgcgccggcgcccgttccgcagtgggcaccgaggcgcgtcgccagttccgctacgacggcgacatgaatatcggcgtgatcaccgatttcgagctggaagtgcgcaatgcgctgaacaggcgggcgcacgccgtcggcgcgcaggacgtggtccagcatggcactgagcagaacaatcctttcccggaggcagatgagaagattttcgtcgtatcggccaccggtgaaagccagatgctcacgcgcgggcaactgaaggaatacattggccagcagcgcggcgagggctatgtcttctacgagaaccgtgcatacggcgtggcggggaaaagcctgttcgacgatgggctgggagccgcgcccggcgtgccgggcggacgttcgaagtcctcgccggatgtactggaaacggtgccggcgtcacccggattgcggcggccgtcgctgggcgcagtggaacgccaggattccggctatgacagccttgatggggtgggatcgcgatcgttctcgttgggcgaggtgtccgacatggccgccgtggaagcggcggaactggaaatgacccggcaagtcttgcacgccggggcgcggcaggacgatgccgagccgggcgtgagcggtgcgtcggcgcactgggggcagcgggcgctgcagggcgcccaggcggtggcggcggcgcagcggctggttcatgccattgccctgatgacgcaattcggccgggccggttccaccaacacgccgcaggaagcggcctcgttgtcggcggccgtgttcggcttgggcgaggccagcagcgccgtggccgaaaccgtgagcggttttttccgcgggtcttcgcgctgggccggcggtttcggcgtggctggcggcgcgatggcgctgggaggcggcatcgccgcggccgttggcgccgggatgtcgttgaccgatgacgcgccggccggacagaaggccgccgtcggcgccgagatcgcgctgcagttgacaggtggaacggtcgagctggcttcttccatcgcgttggcgctggccgcggcgcgcggcgtgaccagcggcttgcaggtggcgggggcgtcggccggggcggctgccggcgcattggccgcggcgctcagtcccatggagatctacggcctggtgcagcaatcgcactatgcggatcagctggacaagctggcgcaggaatcgagcgcatacggttacgagggcgacgccttgctggcccagctgtatcgcgacaagacggccgccgagggcgccgtcgccggcgtctccgccgtcctgagcacggtgggggcggcggtgtcgatcgccgcggcggccagcgtggtaggcgccccggtggcggtggtcacttccttgttgaccggggctctcaacggcatcctgcgcggcgtgcagcagcccatcatcgaaaagctggccaatgattacgctcgcaagatcgacgagctgggcgggccgcaagcgtacttcgagaaaaacctgcaggcgcgtcacgaacaactggccaattcggacggcctacggaaaatgctggctgacctgcaggccgggtggaacgccagcagcgtgatcggggtgcagacgacagagatttccaagtcggcgctcgaactggccgccattaccggcaacgcggacaacctgaaatccgccgacgtgttcgtggaccgcttcatccagggcgagcgggtggccggccagccggtggtactcgacgtcgccgccggcggcatcgatatcgccagccgcaagggcgagcggccggcgctgacgttcatcacgccgctggccgcgccaggagaagagcagcgccggcgcacgaagacgggcaagagcgaattcaccacattcgtcgagatcgtgggcaagcaggaccgctggcgcatccgggacggcgcggccgacaccaccatcgatctggccaaggtggtgtcgcaactggtcgacgccaatggcgtgctcaagcacagcatcaaactggaggtgatcggcggagatggcgatgatgtcgtgcttgccaatgcttcgcgcatccattacgacggcggcgcgggaaccaacacggtcagctatgccgccctgggccgacaggattccattaccgtgtccgccgacggggaacgtttcaacgtgcgcaagcagttgaacaacgccaacgtgtatcgcgaaggcgtggctacccagaaaaccgcctacggcaagcgcacggagaatgtccaataccgccatgtcgagctggcccgtgtcgggcaactggtggaggtcgacacgctcgagcatgtgcagcacatcatcggcggggccggcaacgattcgatcaccggcaatgcgcacgacaacttcctggccggcggggcgggcgacgacaggctggatggcggcgccggcaacgacacactggtcggcggcgagggccacaacacggtcgtcggcggcgctggcgacgacgtattcctgcaggacctgggggtatggagcaaccagctcgatggcggcgcgggcgtcgataccgtgaagtacaacgtgcaccagccttccgaggaacgcctcgaacgcatgggcgacacgggcatccatgccgatcttcaaaagggcacggtcgagaagtggccggccctgaacctgttcagcgtcgaccatgtcaagaatatcgagaatctgcacggctccagcctgaacgacagcatcgccggcgacgaccgggacaacgagctctggggcgacgatggcaacgacacgatacacggccggggcggcgacgatatcctgcgcggcggcctgggcctggacacgctgtatggcgaggacggcaacgacatcttcctgcaggacgacgagaccgtcagcgatgacatcgacggcggcgcggggctggacaccgtcgactattccgccatgatccatgcaggcaagatcgttgcgccgcatgaatacggcttcgggatcgaggcggacctgtccgaagggtgggtgcgcaaggcggcccggcgcggcatgggctactacgacagtgtccgcagtgtcgaaaacgtcatcggcacgagcatgaaggatgtgctcatcggcgacgcgcaagccaataccctgatgggccagggcggcgacgataccgtgcgcggcggcgacggcgatgatctgctgttcggcggcgacggcaacgacatgctgtatggagacgccggcaacgacaccctctacggagggctgggcgacgatacccttgaaggcggcgcgggcaacgattggttcggccagacgccggcgcgcgagcatgacgtgctgcgcggcggggctggggtggataccgtggattacagccaggcgggcgcgcatgccggcgttgccacgggtcgcatcgggctgggtattctggcggacctgggcgccggccgcgtcgacaagctgggcgaggccggcagcagcgcctacgatacggtttccggcatcgaaaatgtggtgggcacggaactggccgaccgcatcacgggcgatgcgcaggccaacgtactgcgcggcgcgggtggtgccgacgtgcttgcgggcggcgagggcgacgatgtgctgctgggcggcgagggcgatgaccagctgtcgggcgacgccggacgcgaccgcttgtacggcgaagccggtgacgactggttcttccaggatgccgccaatgccggcaatctgctcgacggtggtgacggcaacgataccgtggatttcagcggcccgggccggggcctcgacgccggcgcaaagggcgtattcctgagcctgggcaaggggttcgccagcctgatggacgaacccgaaaccagcaacgtgttgcgccatatcgagaacgccgtgggcagcgtgcgtgatgacgtgctgatcggcgacgcaggcgccaacgtcctcaatggcctggcgggcaacgacgtgttgtccggcggcgccggcgacgatgtgctgctgggcgacgagggctcggacctgctcagcggcgatgcgggcaacgacgatctgttcggcgggcagggcgatgatacctatctgttcggggccgggtacggacatgacacgatctacgaatcgggcggcggccatgacaccatccgtatcaacgcgggggcggaccagctgtggtttgcgcgccagggcaacgacctggagatccgcattcttggcaccgacgatgcacttaccgtgcacgactggtatcgcgacgccgatcaccgggtggaagccatccatgccgccaaccaggccatagacccggccggcatcgaaaagctggtcgaggcaatggcgcagtacccggaccccggcgcggcggcggctgccccgccggcggcgcgcgtgccggacacgctgatgcagtccctggctgtcaactggcgctga

SEQ ID NO: 6 - protein, 1706 aa, Bordetella parapertussis (wild type CyaA)
MQQSHQAGYANAADRESGIPAAVLDGIKAVAKEKNATLMFRLVNPHSTSLIAEGVATKGLGVHAKSSDWGLQAGYIPVNPNLSKLFGRAPEVIARADNDVNSSLAHGHTAVDLTLSKERLDYLRQAGLVTGMADGVVASNHAGYEQFEFRVKETSDGRYAVQYRRKGGDDFEAVKVIGNAAGIPLTADIDMFAIMPHLSNFRDSARSSVTSGDSVTDYLARTRRAASEATGGLDRERIDLLWKIARAGARSAVGTEARRQFRYDGDMNIGVITDFELEVRNALNRRAHAVGAQDVVQHGTEQNNPFPEADEKIFVVSATGESQMLTRGQLKEYIGQQRGEGYVFYENRAYGVAGKSLFDDGLGAAPGVPGGRSKSSPDVLETVPASPGLRRPSLGAVERQDSGYDSLDGVGSRSFSLGEVSDMAAVEAAELEMTRQVLHAGARQDDAEPGVSGASAHWGQRALQGAQAVAAAQRLVHAIALMTQFGRAGSTNTPQEAASLSAAVFGLGEASSAVAETVSGFFRGSSRWAGGFGVAGGAMALGGGIAAAVGAGMSLTDDAPAGQKAAVGAEIALQLTGGTVELASSIALALAAARGVTSGLQVAGASAGAAAGALAAALSPMEIYGLVQQSHYADQLDKLAQESSAYGYEGDALLAQLYRDKTAAEGAVAGVSAVLSTVGAAVSIAAAASVVGAPVAVVTSLLTGALNGILRGVQQPIIEKLANDYARKIDELGGPQAYFEKNLQARHEQLANSDGLRKMLADLQAGWNASSVIGVQTTEISKSALELAAITGNADNLKSADVFVDRFIQGERVAGQPVVLDVAAGGIDIASRKGERPALTFITPLAAPGEEQRRRTKTGKSEFTTFVEIVGKQDRWRIRDGAADTTIDLAKVVSQLVDANGVLKHSIKLEVIGGDGDDVVLANASRIHYDGGAGTNTVSYAALGRQDSITVSADGERFNVRKQLNNANVYREGVATQKTAYGKRTENVQYRHVELARVGQLVEVDTLEHVQHIIGGAGNDSITGNAHDNFLAGGAGDDRLDGGAGNDTLVGGEGHNTVVGGAGDDVFLQDLGVWSNQLDGGAGVDTVKYNVHQPSEERLERMGDTGIHADLQKGTVEKWPALNLFSVDHVKNIENLHGSSLNDSIAGDDRDNELWGDDGNDTIHGRGGDDILRGGLGLDTLYGEDGNDIFLQDDETVSDDIDGGAGLDTVDYSAMIHAGKIVAPHEYGFGIEADLSEGWVRKAARRGMGYYDSVRSVENVIGTSMKDVLIGDAQANTLMGQGGDDTVRGGDGDDLLFGGDGNDMLYGDAGNDTLYGGLGDDTLEGGAGNDWFGQTPAREHDVLRGGAGVDTVDYSQAGAHAGVATGRIGLGILADLGAGRVDKLGEAGSSAYDTVSGIENVVGTELADRITGDAQANVLRGAGGADVLAGGEGDDVLLGGEGDDQLSGDAGRDRLYGEAGDDWFFQDAANAGNLLDGGDGNDTVDFSGPGRGLDAGAKGVFLSLGKGFASLMDEPETSNVLRHIENAVGSVRDDVLIGDAGANVLNGLAGNDVLSGGAGDDVLLGDEGSDLLSGDAGNDDLFGGQGDDTYLFGAGYGHDTIYESGGGHDTIRINAGADQLWFARQGNDLEIRILGTDDALTVHDWYRDADHRVEAIHAANQAIDPAGIEKLVEAMAQYPDPGAAAAAPPAARVPDTLMQSLAVNWR

SEQ ID NO: 7 - DNA, 5118 bp, Bordetella bronchiseptica (wild type CyaA)
  CDS (1)..(5118)
atgcagcaatcgcatcaggctggttacgcaaacgccgccgaccgggagtctggcatccccgcagccgtactcgatggcatcaaggccgtggcgaaggaaaaaaacgccacattgatgttccgcctggtcaacccccattccaccagcctgattgccgaaggggtggccaccaaaggattgggcgtgcacgccaagtcgtccgattgggggttgcaggcgggctacattcccgtcaacccgaatctttccaaactgttcggccgtgcgcccgaggtgatcgcgcgggccgacaacgacgtcaacagcagcctggcgcatggccataccgcggtcgacctgacgctgtcgaaagagcggcttgactatctgcggcaagcgggcctggtcaccggcatggccgatggcgtggtcgcgagcaaccacgcaggctacgagcagttcgagtttcgcgtgaaggaaacctcggacgggcgctatgccgtgcagtatcgccgcaagggcggcgacgatttcgaggcggtcaaggtgatcggcaatgccgccggtattccactgacggcggatatcgacatgttcgccatcatgccgcatctgtccaacttccgcgactcggcgcgcagttcggtgaccagcggcgattcggtgaccgattacctggcgcgcacgcggcgggccgccagcgaggccacgggcggcctggatcgcgaacgcatcgacttgttgtggaaaatcgctcgcgccggcgcccgttccgcagtgggcaccgaggcgcgtcgccagttccgctacgacggcgacatgaatatcggcgtgatcaccgatttcgagctggaagtgcgcaatgcgctgaacaggcgggcgcacgcggtcggcaggcaggacgtggtccagcatggcactgagcagaacaatcctttcccggaggcagatgagaagattttcgtcgtatcggccaccggtgaaagccagatgctcacgcgcgggcaactgaaggaatacattggccagcagcgcggcgagggctatgtcttctacgagaaccgtgcgtacggcgtggcggggaaaagcctgttcgacgatgggctgggagccgcgcccggcgtgccggggcgacgttcgaagtcctcgccggatgtactggaaacggtgccggcgtcacccggattgcggcggccgtcgctgggcgcagtggaacgccaggattccggctatgacagccttgatggggtgggatcgcgatcgttctcgttgggcgaggtgtccgacatggccgccgtggaagcggcggaactggaaatgacccggcaagtcttgcacgccggggcgcggcaggacgatgccgagccgggcgtgagcggtgcgtcggcgcactgggggcagcgggcgctgcagggcgcccaggcggtggcggcggcgcagcggctggttcatgccattgccctgatgacgcaattcggccgggccggttccaccaacacgccgcaggaagcggcctcgttgtcggcggccgtgttcggcttgggcgaggccagcagcgccgtggccgaaaccgtgagcggttttttccgcgggtcttcgcgctgggccggcggtttcggcgtggctggcggcgcgatggcgctgggaggcggcatcggcgccgttggcgccgggatgtcgttgaccgatgacgcgccggccggacagaaggccgccgccggcgccgagatcgcgctgcagttgacaggtggaacggtcgagctggcttcttccatcgcgttggcgctggccgcggcgcgcggcgtgaccagcggcttgcaggtggcgggggcgtcggccggggcggctgccggcgcattggccgcggcgctcagtcccatggagatctacggcctggtgcagcaatcgcactatgcggatcagctggacaagctggcgcaggaatcgagcgcatacggttacgagggcgacgccttgctggcccagctgtatcgcgacaagacggccgccgagggcgccgtcgccggcgtctccgccgtcctgagcacggtgggggctgcggtgtcgatcgccgcggcggccagcgtggtaggcgccccggtggcggtggtcacttccttgttgaccggggctctcaacggcatcctgcgcggcgtgcagcagcccatcatcgaaaagctggccaatgattacgctcgcaagatcgacgagctgggcgggccgcaagcgtacttcgagaaaaacctgcaggcgcgtcacgaacaactggccaattcggacggcctacggaaaatgctggccgacctgcaggccgggtggaacgccagcagcgtgatcggggtgcagacgacagagatttccaagtcggcgctcgaactggccgccattaccggcaacgcggacaacctgaaatccgccgacgtgttcgtggaccgcttcatccagggcgagcgggtggccggccagccggtggtactcgacgtcgccgccggcggcatcgatatcgccagccgcaagggcgagcggccggcgctgacgttcatcacgccgctggccgcgccaggagaagagcagcgccggcgcacgaaaacgggcaagagcgaattcaccacattcgtcgagatcgtgggcaagcaggaccgctggcgcatccgggacggcgcggccgacaccaccatcgatctggccaaggtggtgtcgcaactggtcgacgccaatggcgtgctcaagcacagcatcaaactggaggtgatcggcggagatggcgatgatgtcgtgcttgccaatgcttcgcgcatccattacgacggcggcgcgggaaccaacacggtcagctatgccgccctgggccgacaggattccattaccgtgtccgccgacggggaacgtttcaacgtgcgcaagcagttgaacaacgccaacgtgtatcgcgaaggcgtggctacccagaaaaccgcctacggcaagcgcacggagaatgtccaataccgccatgtcgagctggcccgtgtcgggcaactggtggaggtcgacacgctcgagcatgtgcagcacatcatcggcggggccggcaacgattcgatcaccggcaatgcgcacgacaacttcctggccggcggggcgggcgacgacaggctggatggcggcgccggcaacgacacactggtcggcggcgagggccacaacacggtcgtcggcggcgctggcgacgacgtattcctgcaggacctgggggtatggagcaaccagctcgatggcggcgcgggcgtcgataccgtgaagtacaacgtgcaccagccttccgaggaacgcctcgaacgcatgggcgacacgggcatccatgccgatcttcaaaagggcacggtcgagaagtggccggccctgaacctgttcagcgtcgaccatgtcaagaatatcgagaatctgcacggctccagcctgaacgacagcatcgccggcgacgaccgggacaacgagctctggggcgacgatggcaacgacacgatacacggccggggcggcgacgatatcctgcgcggcggcctgggcctggacacgctgtatggcgaggacggcaacgacatcttcctgcaggacgacgagaccgtcagcgatgacatcgacggtggcgcgggactggacaccgtcgactattccgccatgatccatgcaggcaagatcgttgcgccgcatgaatacggcttcgggatcgaggcggacctgtccgaagggtgggtgcgcaaggcggcccggcgcggcatggactactacgacagtgtccgcagtgtcgaaaacgtcatcggcacgagcatgaaggatgtgctcatcggcgacgcgcaagccaataccctgatgggccagggcggcgacgataccgtgcgcggcggcgacggcgatgatctgctgttcggcggcgacggcaacgacatgctgtatggagacgccggcaacgacaccctctacggagggctgggcgacgatacccttgaaggcggcgcgggcaacgattggttcggccagacgccggcgcgcgagcatgacgtgctgcgcggcggggctggggtggataccgtggattacagccaggcgggcgcgcatgccggcgttgccacgggtcgcatcgggctgggtattctggcggacctgggcgccggccgcgtcgacaagctgggcgaggccggcagcagcgcctacgatacggtttccggcatcgaaaatgtggtgggcacggaactggccgaccgcatcacgggcgatgcgcaggccaacgtactgcgcggcgcgggtggcgccgacgtgcttgcgggcggcgagggcgacgatgtgctgctgggcggcgacggcgacgaccagctgtcgggcgacgccggacgcgaccgcttgtacggcgaagccggtgacgactggttcttccaggatgccgccaatgccggcaatctgctcgacggtggtgacggcaacgataccgtggatttcagcggcccgggccggggcctcgacgccggcgcaaagggcgtattcctgagcctgggcaaggggttcgccagcctgatggacgaacccgaaaccagcaacgtgttgcgccatatcgagaacgccgtgggcagcgtgcgtgatgacgtgctgatcggcgacgcaggcgccaacgtcctcaatggcctggcgggcaacgacgtgctgtccggcggcgccggcgacgatgtgctgctgggcgacgagggctcggacctgctcagcggcgatgcgggcaacgacgatctgttcggcgggcagggcgatgatacctatctgttcggggccgggtacggacatgacacgatctacgaatcgggcggcggccatgacaccatccgtatcaacgcgggggcggaccagctgtggtttgcgcgccagggcaacgacctggagatccgcattcttggcaccgacgatgcacttaccgtgcacgactggtatcgcgacgccgatcaccgggtggaagccatccatgccgccaaccaggccatagacccggccggcatcgaaaagctggtcgaggcaatggcgcagtacccggaccccggcgcggcggcggctgccccgccggcggcgcgcgtgccggacacgctgatgcagtccctggctgtcaactggcgctga

SEQ ID NO: 8 - protein, 1705 aa, Bordetella bronchiseptica (wild type CyaA)
MQQSHQAGYANAADRESGIPAAVLDGIKAVAKEKNATLMFRLVNPHSTSLIAEGVATKGLGVHAKSSDWGLQAGYIPVNPNLSKLFGRAPEVIARADNDVNSSLAHGHTAVDLTLSKERLDYLRQAGLVTGMADGVVASNHAGYEQFEFRVKETSDGRYAVQYRRKGGDDFEAVKVIGNAAGIPLTADIDMFAIMPHLSNFRDSARSSVTSGDSVTDYLARTRRAASEATGGLDRERIDLLWKIARAGARSAVGTEARRQFRYDGDMNIGVITDFELEVRNALNRRAHAVGRQDVVQHGTEQNNPFPEADEKIFVVSATGESQMLTRGQLKEYIGQQRGEGYVFYENRAYGVAGKSLFDDGLGAAPGVPGRRSKSSPDVLETVPASPGLRRPSLGAVERQDSGYDSLDGVGSRSFSLGEVSDMAAVEAAELEMTRQVLHAGARQDDAEPGVSGASAHWGQRALQGAQAVAAAQRLVHAIALMTQFGRAGSTNTPQEAASLSAAVFGLGEASSAVAETVSGFFRGSSRWAGGFGVAGGAMALGGGIGAVGAGMSLTDDAPAGQKAAAGAEIALQLTGGTVELASSIALALAAARGVTSGLQVAGASAGAAAGALAAALSPMEIYGLVQQSHYADQLDKLAQESSAYGYEGDALLAQLYRDKTAAEGAVAGVSAVLSTVGAAVSIAAAASVVGAPVAVVTSLLTGALNGILRGVQQPIIEKLANDYARKIDELGGPQAYFEKNLQARHEQLANSDGLRKMLADLQAGWNASSVIGVQTTEISKSALELAAITGNADNLKSADVFVDRFIQGERVAGQPVVLDVAAGGIDIASRKGERPALTFITPLAAPGEEQRRRTKTGKSEFTTFVEIVGKQDRWRIRDGAADTTIDLAKVVSQLVDANGVLKHSIKLEVIGGDGDDVVLANASRIHYDGGAGTNTVSYAALGRQDSITVSADGERFNVRKQLNNANVYREGVATQKTAYGKRTENVQYRHVELARVGQLVEVDTLEHVQHIIGGAGNDSITGNAHDNFLAGGAGDDRLDGGAGNDTLVGGEGHNTVVGGAGDDVFLQDLGVWSNQLDGGAGVDTVKYNVHQPSEERLERMGDTGIHADLQKGTVEKWPALNLFSVDHVKNIENLHGSSLNDSIAGDDRDNELWGDDGNDTIHGRGGDDILRGGLGLDTLYGEDGNDIFLQDDETVSDDIDGGAGLDTVDYSAMIHAGKIVAPHEYGFGIEADLSEGWVRKAARRGMDYYDSVRSVENVIGTSMKDVLIGDAQANTLMGQGGDDTVRGGDGDDLLFGGDGNDMLYGDAGNDTLYGGLGDDTLEGGAGNDWFGQTPAREHDVLRGGAGVDTVDYSQAGAHAGVATGRIGLGILADLGAGRVDKLGEAGSSAYDTVSGIENVVGTELADRITGDAQANVLRGAGGADVLAGGEGDDVLLGGDGDDQLSGDAGRDRLYGEAGDDWFFQDAANAGNLLDGGDGNDTVDFSGPGRGLDAGAKGVFLSLGKGFASLMDEPETSNVLRHIENAVGSVRDDVLIGDAGANVLNGLAGNDVLSGGAGDDVLLGDEGSDLLSGDAGNDDLFGGQGDDTYLFGAGYGHDTIYESGGGHDTIRINAGADQLWFARQGNDLEIRILGTDDALTVHDWYRDADHRVEAIHAANQAIDPAGIEKLVEAMAQYPDPGAAAAAPPAARVPDTLMQSLAVNWR

SEQ ID NO: 9 - DNA, 4842 bp, Artificial Sequence
  Nucleotide sequence encoding polypeptide 1-227 + 321-1706 of SEQ ID NO:2
  CDS (1)..(4842)
atgcagcagtcccatcaggccggttacgcaaacgcagccgatcgtgaatctggtatcccggcagcggttctggatggtattaaggcagttgccaaagagaagaacgctaccctgatgttccgtctggtcaacccacactctacttccctgatcgcggaaggtgtggcgaccaaaggcctgggtgtgcacgccaaaagcagcgactggggtctgcaggcaggttatattccggtgaacccgaatctgtctaaactgttcggtcgtgccccggaggtgatcgcacgtgcagacaacgatgtcaactcttctctggcgcatggtcacaccgcggttgatctgaccctgtccaaagaacgcctggattacctgcgtcaggcgggcctggtgacgggcatggccgacggtgttgtagcgagcaaccacgcgggttatgaacaatttgagtttcgcgttaaagagacctctgacggtcgttacgcggtgcagtaccgccgcaaaggtggcgatgactttgaagctgtcaaagtgatcggtaacgctgctggaattccgctgaccgcggatatcgacatgtttgccatcatgcctcacctgtccaactttcgcgattccgcacgcagctctgtgacgtctggtgattccgtcactgactacctggctcgtacccgtcgtgcggcctctgaatcccagatgctgactcgtggccagctgaaagaatacatcggccaacagcgtggcgaaggctacgttttctacgagaatcgtgcttacggcgttgcgggcaaatccctgttcgacgatggtctgggcgctgcaccgggcgttccgagcggccgttctaaattcagcccggacgtactggaaactgtgccggcttccccgggcctgcgccgtccgtccctgggcgcagtcgaacgtcaggactccggctacgattccctggatggcgttggctcccgctccttctccctgggcgaggtttctgacatggctgcggtggaagcggcagagctggaaatgacccgtcaagtgctgcacgcgggcgcacgtcaggacgatgctgagccgggcgtgtccggtgcgtctgcacactggggtcaacgtgccctgcagggtgctcaagctgtcgcggcagcgcagcgtctggtacatgcgatcgcactgatgacccagttcggtcgcgcaggttctaccaacactcctcaggaagcagctagcctgtctgctgctgttttcggtctgggcgaagcgtcttctgcggttgcagaaaccgtgagcggtttcttccgtggttctagccgctgggcgggtggttttggtgtagcaggtggcgctatggccctgggtggcggtatcgcggctgctgtcggcgcaggtatgagcctgaccgacgatgctcctgcgggccagaaagccgcagctggcgctgaaatcgcgctgcagctgactggtggtaccgttgaactggctagctctatcgcgctggctctggcagcggcacgtggcgtgacttctggcctgcaagtcgccggtgcctctgcgggcgctgctgcgggcgctctggcagctgcactgtcccccatggaaatctacggtctggtacagcagtctcactacgcagaccagctggataaactggcgcaggagtcttctgcatacggttacgaaggcgacgcactgctggcgcagctgtatcgtgacaaaactgctgctgaaggtgctgtggcaggcgtttctgcggtactgtctaccgttggcgctgcggtttctattgcggctgccgcatccgttgtaggtgcgccggttgctgtagttacctctctgctgactggtgcactgaacggtatcctgcgtggtgttcagcagcctattatcgaaaaactggcgaatgattatgcccgtaaaatcgacgaactgggcggtccgcaggcttattttgaaaaaaacctgcaggcgcgccacgaacagctggcaaacagcgacggcctgcgcaaaatgctggcagacctgcaagctggttggaacgcgtcttctgtgatcggcgtgcagaccaccgaaattagcaaatctgcgctggaactggctgcaattactggcaacgcggataacctgaaaagcgttgatgtttttgtcgatcgcttcgttcagggcgagcgcgttgctggtcagccggttgttctggacgttgcggcaggcggcatcgacatcgctagccgcaagggcgagcgtccggctctgactttcattaccccgctggcagctccgggtgaagaacagcgtcgccgtaccaagactggtaaaagcgagttcaccaccttcgtggaaatcgtaggtaaacaggaccgctggcgtattcgcgacggtgcggcggacaccaccatcgacctggcaaaagttgtttcccaactggtagatgctaacggcgtgctgaaacattctattaaactggatgtaatcggcggtgacggcgatgacgttgtactggcgaacgcgtctcgtatccactatgacggcggcgcaggtaccaacacggtttcctacgcagcgctgggccgccaggattccatcactgttagcgccgatggcgaacgtttcaacgtgcgtaaacagctgaataacgcaaacgtctatcgtgagggtgtagctacccagaccaccgcgtacggtaagcgtaccgaaaacgttcagtatcgtcacgtggaactggcacgtgtgggtcagctggtagaggtggatacgctggaacacgtgcagcacatcatcggtggcgccggtaacgattccattactggtaacgctcacgacaacttcctggcaggtggttctggtgatgatcgtctggacggtggtgcgggtaacgatacgctggtaggcggcgaaggtcagaacaccgtaattggtggtgccggtgacgacgttttcctgcaggatctgggcgtttggagcaaccagctggatggcggtgccggtgttgacacggttaagtataacgttcaccagccgtctgaagagcgcctggaacgtatgggtgacactggtattcatgccgatctgcagaaaggcactgttgaaaaatggcctgcgctgaacctgttctctgtggaccatgttaagaacattgaaaacctgcatggctctcgcctgaacgaccgtatcgctggtgacgaccaggataacgaactgtggggtcatgacggcaatgataccattcgcggtcgtggcggcgacgatattctgcgtggcggtctgggcctggataccctgtatggtgaagatggtaacgatattttcctgcaagacgatgaaacggtatctgatgacatcgacggtggtgcaggcctggacaccgtagattacagcgctatgatccatccgggtcgtatcgtagctccgcacgagtacggcttcggtatcgaggcggacctgtctcgtgaatgggttcgtaaagcgtccgcgctgggtgtggactactacgataacgttcgtaacgtggaaaacgtgatcggtacctccatgaaagacgtgctgattggcgacgcacaggccaacactctgatgggccagggcggtgatgacacggttcgcggcggcgacggtgatgacctgctgttcggtggtgacggcaacgacatgctgtacggcgacgcgggcaacgacaccctgtacggcggtctgggtgacgacactctggaaggtggtgcaggtaacgactggttcggccaaacccaggcacgcgaacacgacgtgctgcgtggtggcgacggcgtagacaccgtggattactcccaaactggcgctcacgcgggtatcgcggccggtcgtatcggtctgggcattctggccgatctgggtgccggccgtgtcgacaaactgggtgaggctggctctagcgcctatgatactgtttccggcatcgaaaacgtggtaggcactgaactggcagatcgtatcacgggtgacgcgcaagcgaacgttctgcgtggtgctggcggtgcagacgtgctggcgggtggtgaaggcgacgacgtactgctgggcggtgacggtgacgatcagctgagcggtgatgcgggtcgtgaccgtctgtacggtgaagcaggtgacgattggttcttccaggacgctgctaacgctggcaacctgctggacggcggcgatggccgtgacactgttgacttcagcggtccgggtcgcggtctggacgcaggcgcgaaaggcgttttcctgagcctgggtaagggtttcgcatctctgatggacgaaccagaaaccagcaatgtcctgcgtaacatcgaaaacgctgtcggttccgcacgcgatgatgttctgattggcgatgctggtgccaatgttctgaacggtctggcgggtaatgatgtactgtctggtggcgctggtgatgatgtcctgctgggtgatgagggcagcgatctgctgtccggcgatgccggcaacgacgatctgttcggtggccaaggtgatgatacttacctgttcggcgttggctatggtcatgacaccatctatgagtctggtggcggccacgatacgattcgtattaatgcaggtgctgaccaactgtggtttgcacgtcagggtaacgatctggaaattcgcatcctgggtactgatgacgctctgaccgtacacgactggtaccgcgatgcggatcaccgcgtagaaatcatccatgcggctaaccaagctgtagaccaggctggtattgaaaaactggtagaagcgatggcacagtatccggacccaggtgcggctgctgcagcacctccagcggctcgtgtgccggataccctgatgcagagcctggccgtcaattggcgttaa

SEQ ID NO: 10 - protein, 1613 aa, Artificial Sequence
  Synthetic Construct
MQQSHQAGYANAADRESGIPAAVLDGIKAVAKEKNATLMFRLVNPHSTSLIAEGVATKGLGVHAKSSDWGLQAGYIPVNPNLSKLFGRAPEVIARADNDVNSSLAHGHTAVDLTLSKERLDYLRQAGLVTGMADGVVASNHAGYEQFEFRVKETSDGRYAVQYRRKGGDDFEAVKVIGNAAGIPLTADIDMFAIMPHLSNFRDSARSSVTSGDSVTDYLARTRRAASESQMLTRGQLKEYIGQQRGEGYVFYENRAYGVAGKSLFDDGLGAAPGVPSGRSKFSPDVLETVPASPGLRRPSLGAVERQDSGYDSLDGVGSRSFSLGEVSDMAAVEAAELEMTRQVLHAGARQDDAEPGVSGASAHWGQRALQGAQAVAAAQRLVHAIALMTQFGRAGSTNTPQEAASLSAAVFGLGEASSAVAETVSGFFRGSSRWAGGFGVAGGAMALGGGIAAAVGAGMSLTDDAPAGQKAAAGAEIALQLTGGTVELASSIALALAAARGVTSGLQVAGASAGAAAGALAAALSPMEIYGLVQQSHYADQLDKLAQESSAYGYEGDALLAQLYRDKTAAEGAVAGVSAVLSTVGAAVSIAAAASVVGAPVAVVTSLLTGALNGILRGVQQPIIEKLANDYARKIDELGGPQAYFEKNLQARHEQLANSDGLRKMLADLQAGWNASSVIGVQTTEISKSALELAAITGNADNLKSVDVFVDRFVQGERVAGQPVVLDVAAGGIDIASRKGERPALTFITPLAAPGEEQRRRTKTGKSEFTTFVEIVGKQDRWRIRDGAADTTIDLAKVVSQLVDANGVLKHSIKLDVIGGDGDDVVLANASRIHYDGGAGTNTVSYAALGRQDSITVSADGERFNVRKQLNNANVYREGVATQTTAYGKRTENVQYRHVELARVGQLVEVDTLEHVQHIIGGAGNDSITGNAHDNFLAGGSGDDRLDGGAGNDTLVGGEGQNTVIGGAGDDVFLQDLGVWSNQLDGGAGVDTVKYNVHQPSEERLERMGDTGIHADLQKGTVEKWPALNLFSVDHVKNIENLHGSRLNDRIAGDDQDNELWGHDGNDTIRGRGGDDILRGGLGLDTLYGEDGNDIFLQDDETVSDDIDGGAGLDTVDYSAMIHPGRIVAPHEYGFGIEADLSREWVRKASALGVDYYDNVRNVENVIGTSMKDVLIGDAQANTLMGQGGDDTVRGGDGDDLLFGGDGNDMLYGDAGNDTLYGGLGDDTLEGGAGNDWFGQTQAREHDVLRGGDGVDTVDYSQTGAHAGIAAGRIGLGILADLGAGRVDKLGEAGSSAYDTVSGIENVVGTELADRITGDAQANVLRGAGGADVLAGGEGDDVLLGGDGDDQLSGDAGRDRLYGEAGDDWFFQDAANAGNLLDGGDGRDTVDFSGPGRGLDAGAKGVFLSLGKGFASLMDEPETSNVLRNIENAVGSARDDVLIGDAGANVLNGLAGNDVLSGGAGDDVLLGDEGSDLLSGDAGNDDLFGGQGDDTYLFGVGYGHDTIYESGGGHDTIRINAGADQLWFARQGNDLEIRILGTDDALTVHDWYRDADHRVEIIHAANQAVDQAGIEKLVEAMAQYPDPGAAAAAPPAARVPDTLMQSLAVNWR

SEQ ID NO: 11 - DNA, 4512 bp, Artificial Sequence
  Nucleotide sequence encoding polypeptide 1-183 + 387-1706 of SEQ ID NO:2
  CDS (1)..(4512)
atgcagcagtcccatcaggccggttacgcaaacgcagccgatcgtgaatctggtatcccggcagcggttctggatggtattaaggcagttgccaaagagaagaacgctaccctgatgttccgtctggtcaacccacactctacttccctgatcgcggaaggtgtggcgaccaaaggcctgggtgtgcacgccaaaagcagcgactggggtctgcaggcaggttatattccggtgaacccgaatctgtctaaactgttcggtcgtgccccggaggtgatcgcacgtgcagacaacgatgtcaactcttctctggcgcatggtcacaccgcggttgatctgaccctgtccaaagaacgcctggattacctgcgtcaggcgggcctggtgacgggcatggccgacggtgttgtagcgagcaaccacgcgggttatgaacaatttgagtttcgcgttaaagagacctctgacggtcgttacgcggtgcagtaccgccgcaaaggtggcgatgactttgaagctgtcaaagtgatcggtaacgctgctggaattccgggcctgcgccgtccgtccctgggcgcagtcgaacgtcaggactccggctacgattccctggatggcgttggctcccgctccttctccctgggcgaggtttctgacatggctgcggtggaagcggcagagctggaaatgacccgtcaagtgctgcacgcgggcgcacgtcaggacgatgctgagccgggcgtgtccggtgcgtctgcacactggggtcaacgtgccctgcagggtgctcaagctgtcgcggcagcgcagcgtctggtacatgcgatcgcactgatgacccagttcggtcgcgcaggttctaccaacactcctcaggaagcagctagcctgtctgctgctgttttcggtctgggcgaagcgtcttctgcggttgcagaaaccgtgagcggtttcttccgtggttctagccgctgggcgggtggttttggtgtagcaggtggcgctatggccctgggtggcggtatcgcggctgctgtcggcgcaggtatgagcctgaccgacgatgctcctgcgggccagaaagccgcagctggcgctgaaatcgcgctgcagctgactggtggtaccgttgaactggctagctctatcgcgctggctctggcagcggcacgtggcgtgacttctggcctgcaagtcgccggtgcctctgcgggcgctgctgcgggcgctctggcagctgcactgtcccccatggaaatctacggtctggtacagcagtctcactacgcagaccagctggataaactggcgcaggagtcttctgcatacggttacgaaggcgacgcactgctggcgcagctgtatcgtgacaaaactgctgctgaaggtgctgtggcaggcgtttctgcggtactgtctaccgttggcgctgcggtttctattgcggctgccgcatccgttgtaggtgcgccggttgctgtagttacctctctgctgactggtgcactgaacggtatcctgcgtggtgttcagcagcctattatcgaaaaactggcgaatgattatgcccgtaaaatcgacgaactgggcggtccgcaggcttattttgaaaaaaacctgcaggcgcgccacgaacagctggcaaacagcgacggcctgcgcaaaatgctggcagacctgcaagctggttggaacgcgtcttctgtgatcggcgtgcagaccaccgaaattagcaaatctgcgctggaactggctgcaattactggcaacgcggataacctgaaaagcgttgatgtttttgtcgatcgcttcgttcagggcgagcgcgttgctggtcagccggttgttctggacgttgcggcaggcggcatcgacatcgctagccgcaagggcgagcgtccggctctgactttcattaccccgctggcagctccgggtgaagaacagcgtcgccgtaccaagactggtaaaagcgagttcaccaccttcgtggaaatcgtaggtaaacaggaccgctggcgtattcgcgacggtgcggcggacaccaccatcgacctggcaaaagttgtttcccaactggtagatgctaacggcgtgctgaaacattctattaaactggatgtaatcggcggtgacggcgatgacgttgtactggcgaacgcgtctcgtatccactatgacggcggcgcaggtaccaacacggtttcctacgcagcgctgggccgccaggattccatcactgttagcgccgatggcgaacgtttcaacgtgcgtaaacagctgaataacgcaaacgtctatcgtgagggtgtagctacccagaccaccgcgtacggtaagcgtaccgaaaacgttcagtatcgtcacgtggaactggcacgtgtgggtcagctggtagaggtggatacgctggaacacgtgcagcacatcatcggtggcgccggtaacgattccattactggtaacgctcacgacaacttcctggcaggtggttctggtgatgatcgtctggacggtggtgcgggtaacgatacgctggtaggcggcgaaggtcagaacaccgtaattggtggtgccggtgacgacgttttcctgcaggatctgggcgtttggagcaaccagctggatggcggtgccggtgttgacacggttaagtataacgttcaccagccgtctgaagagcgcctggaacgtatgggtgacactggtattcatgccgatctgcagaaaggcactgttgaaaaatggcctgcgctgaacctgttctctgtggaccatgttaagaacattgaaaacctgcatggctctcgcctgaacgaccgtatcgctggtgacgaccaggataacgaactgtggggtcatgacggcaatgataccattcgcggtcgtggcggcgacgatattctgcgtggcggtctgggcctggataccctgtatggtgaagatggtaacgatattttcctgcaagacgatgaaacggtatctgatgacatcgacggtggtgcaggcctggacaccgtagattacagcgctatgatccatccgggtcgtatcgtagctccgcacgagtacggcttcggtatcgaggcggacctgtctcgtgaatgggttcgtaaagcgtccgcgctgggtgtggactactacgataacgttcgtaacgtggaaaacgtgatcggtacctccatgaaagacgtgctgattggcgacgcacaggccaacactctgatgggccagggcggtgatgacacggttcgcggcggcgacggtgatgacctgctgttcggtggtgacggcaacgacatgctgtacggcgacgcgggcaacgacaccctgtacggcggtctgggtgacgacactctggaaggtggtgcaggtaacgactggttcggccaaacccaggcacgcgaacacgacgtgctgcgtggtggcgacggcgtagacaccgtggattactcccaaactggcgctcacgcgggtatcgcggccggtcgtatcggtctgggcattctggccgatctgggtgccggccgtgtcgacaaactgggtgaggctggctctagcgcctatgatactgtttccggcatcgaaaacgtggtaggcactgaactggcagatcgtatcacgggtgacgcgcaagcgaacgttctgcgtggtgctggcggtgcagacgtgctggcgggtggtgaaggcgacgacgtactgctgggcggtgacggtgacgatcagctgagcggtgatgcgggtcgtgaccgtctgtacggtgaagcaggtgacgattggttcttccaggacgctgctaacgctggcaacctgctggacggcggcgatggccgtgacactgttgacttcagcggtccgggtcgcggtctggacgcaggcgcgaaaggcgttttcctgagcctgggtaagggtttcgcatctctgatggacgaaccagaaaccagcaatgtcctgcgtaacatcgaaaacgctgtcggttccgcacgcgatgatgttctgattggcgatgctggtgccaatgttctgaacggtctggcgggtaatgatgtactgtctggtggcgctggtgatgatgtcctgctgggtgatgagggcagcgatctgctgtccggcgatgccggcaacgacgatctgttcggtggccaaggtgatgatacttacctgttcggcgttggctatggtcatgacaccatctatgagtctggtggcggccacgatacgattcgtattaatgcaggtgctgaccaactgtggtttgcacgtcagggtaacgatctggaaattcgcatcctgggtactgatgacgctctgaccgtacacgactggtaccgcgatgcggatcaccgcgtagaaatcatccatgcggctaaccaagctgtagaccaggctggtattgaaaaactggtagaagcgatggcacagtatccggacccaggtgcggctgctgcagcacctccagcggctcgtgtgccggataccctgatgcagagcctggccgtcaattggcgttaa

SEQ ID NO: 12 - protein, 1503 aa, Artificial Sequence
  Synthetic Construct
MQQSHQAGYANAADRESGIPAAVLDGIKAVAKEKNATLMFRLVNPHSTSLIAEGVATKGLGVHAKSSDWGLQAGYIPVNPNLSKLFGRAPEVIARADNDVNSSLAHGHTAVDLTLSKERLDYLRQAGLVTGMADGVVASNHAGYEQFEFRVKETSDGRYAVQYRRKGGDDFEAVKVIGNAAGIPGLRRPSLGAVERQDSGYDSLDGVGSRSFSLGEVSDMAAVEAAELEMTRQVLHAGARQDDAEPGVSGASAHWGQRALQGAQAVAAAQRLVHAIALMTQFGRAGSTNTPQEAASLSAAVFGLGEASSAVAETVSGFFRGSSRWAGGFGVAGGAMALGGGIAAAVGAGMSLTDDAPAGQKAAAGAEIALQLTGGTVELASSIALALAAARGVTSGLQVAGASAGAAAGALAAALSPMEIYGLVQQSHYADQLDKLAQESSAYGYEGDALLAQLYRDKTAAEGAVAGVSAVLSTVGAAVSIAAAASVVGAPVAVVTSLLTGALNGILRGVQQPIIEKLANDYARKIDELGGPQAYFEKNLQARHEQLANSDGLRKMLADLQAGWNASSVIGVQTTEISKSALELAAITGNADNLKSVDVFVDRFVQGERVAGQPVVLDVAAGGIDIASRKGERPALTFITPLAAPGEEQRRRTKTGKSEFTTFVEIVGKQDRWRIRDGAADTTIDLAKVVSQLVDANGVLKHSIKLDVIGGDGDDVVLANASRIHYDGGAGTNTVSYAALGRQDSITVSADGERFNVRKQLNNANVYREGVATQTTAYGKRTENVQYRHVELARVGQLVEVDTLEHVQHIIGGAGNDSITGNAHDNFLAGGSGDDRLDGGAGNDTLVGGEGQNTVIGGAGDDVFLQDLGVWSNQLDGGAGVDTVKYNVHQPSEERLERMGDTGIHADLQKGTVEKWPALNLFSVDHVKNIENLHGSRLNDRIAGDDQDNELWGHDGNDTIRGRGGDDILRGGLGLDTLYGEDGNDIFLQDDETVSDDIDGGAGLDTVDYSAMIHPGRIVAPHEYGFGIEADLSREWVRKASALGVDYYDNVRNVENVIGTSMKDVLIGDAQANTLMGQGGDDTVRGGDGDDLLFGGDGNDMLYGDAGNDTLYGGLGDDTLEGGAGNDWFGQTQAREHDVLRGGDGVDTVDYSQTGAHAGIAAGRIGLGILADLGAGRVDKLGEAGSSAYDTVSGIENVVGTELADRITGDAQANVLRGAGGADVLAGGEGDDVLLGGDGDDQLSGDAGRDRLYGEAGDDWFFQDAANAGNLLDGGDGRDTVDFSGPGRGLDAGAKGVFLSLGKGFASLMDEPETSNVLRNIENAVGSARDDVLIGDAGANVLNGLAGNDVLSGGAGDDVLLGDEGSDLLSGDAGNDDLFGGQGDDTYLFGVGYGHDTIYESGGGHDTIRINAGADQLWFARQGNDLEIRILGTDDALTVHDWYRDADHRVEIIHAANQAVDQAGIEKLVEAMAQYPDPGAAAAAPPAARVPDTLMQSLAVNWR

SEQ ID NO: 13 - protein, 1613 aa, Artificial Sequence; identical to SEQ ID NO: 10
  Polypeptide 1-227 + 321-1706 of SEQ ID NO: 4

SEQ ID NO: 14 - protein, 1503 aa, Artificial Sequence; identical to SEQ ID NO: 12
  Polypeptide 1-183 + 387-1706 of SEQ ID NO:4

SEQ ID NO: 15 - protein, 1613 aa, Artificial Sequence
  Polypeptide 1-227 + 321-1706 of SEQ ID NO:6
MQQSHQAGYANAADRESGIPAAVLDGIKAVAKEKNATLMFRLVNPHSTSLIAEGVATKGLGVHAKSSDWGLQAGYIPVNPNLSKLFGRAPEVIARADNDVNSSLAHGHTAVDLTLSKERLDYLRQAGLVTGMADGVVASNHAGYEQFEFRVKETSDGRYAVQYRRKGGDDFEAVKVIGNAAGIPLTADIDMFAIMPHLSNFRDSARSSVTSGDSVTDYLARTRRAASESQMLTRGQLKEYIGQQRGEGYVFYENRAYGVAGKSLFDDGLGAAPGVPGGRSKSSPDVLETVPASPGLRRPSLGAVERQDSGYDSLDGVGSRSFSLGEVSDMAAVEAAELEMTRQVLHAGARQDDAEPGVSGASAHWGQRALQGAQAVAAAQRLVHAIALMTQFGRAGSTNTPQEAASLSAAVFGLGEASSAVAETVSGFFRGSSRWAGGFGVAGGAMALGGGIAAAVGAGMSLTDDAPAGQKAAVGAEIALQLTGGTVELASSIALALAAARGVTSGLQVAGASAGAAAGALAAALSPMEIYGLVQQSHYADQLDKLAQESSAYGYEGDALLAQLYRDKTAAEGAVAGVSAVLSTVGAAVSIAAAASVVGAPVAVVTSLLTGALNGILRGVQQPIIEKLANDYARKIDELGGPQAYFEKNLQARHEQLANSDGLRKMLADLQAGWNASSVIGVQTTEISKSALELAAITGNADNLKSADVFVDRFIQGERVAGQPVVLDVAAGGIDIASRKGERPALTFITPLAAPGEEQRRRTKTGKSEFTTFVEIVGKQDRWRIRDGAADTTIDLAKVVSQLVDANGVLKHSIKLEVIGGDGDDVVLANASRIHYDGGAGTNTVSYAALGRQDSITVSADGERFNVRKQLNNANVYREGVATQKTAYGKRTENVQYRHVELARVGQLVEVDTLEHVQHIIGGAGNDSITGNAHDNFLAGGAGDDRLDGGAGNDTLVGGEGHNTVVGGAGDDVFLQDLGVWSNQLDGGAGVDTVKYNVHQPSEERLERMGDTGIHADLQKGTVEKWPALNLFSVDHVKNIENLHGSSLNDSIAGDDRDNELWGDDGNDTIHGRGGDDILRGGLGLDTLYGEDGNDIFLQDDETVSDDIDGGAGLDTVDYSAMIHAGKIVAPHEYGFGIEADLSEGWVRKAARRGMGYYDSVRSVENVIGTSMKDVLIGDAQANTLMGQGGDDTVRGGDGDDLLFGGDGNDMLYGDAGNDTLYGGLGDDTLEGGAGNDWFGQTPAREHDVLRGGAGVDTVDYSQAGAHAGVATGRIGLGILADLGAGRVDKLGEAGSSAYDTVSGIENVVGTELADRITGDAQANVLRGAGGADVLAGGEGDDVLLGGEGDDQLSGDAGRDRLYGEAGDDWFFQDAANAGNLLDGGDGNDTVDFSGPGRGLDAGAKGVFLSLGKGFASLMDEPETSNVLRHIENAVGSVRDDVLIGDAGANVLNGLAGNDVLSGGAGDDVLLGDEGSDLLSGDAGNDDLFGGQGDDTYLFGAGYGHDTIYESGGGHDTIRINAGADQLWFARQGNDLEIRILGTDDALTVHDWYRDADHRVEAIHAANQAIDPAGIEKLVEAMAQYPDPGAAAAAPPAARVPDTLMQSLAVNWR

SEQ ID NO: 16 - protein, 1503 aa, Artificial Sequence
  Polypeptide 1-183 + 387-1706 of SEQ ID NO:6
MQQSHQAGYANAADRESGIPAAVLDGIKAVAKEKNATLMFRLVNPHSTSLIAEGVATKGLGVHAKSSDWGLQAGYIPVNPNLSKLFGRAPEVIARADNDVNSSLAHGHTAVDLTLSKERLDYLRQAGLVTGMADGVVASNHAGYEQFEFRVKETSDGRYAVQYRRKGGDDFEAVKVIGNAAGIPGLRRPSLGAVERQDSGYDSLDGVGSRSFSLGEVSDMAAVEAAELEMTRQVLHAGARQDDAEPGVSGASAHWGQRALQGAQAVAAAQRLVHAIALMTQFGRAGSTNTPQEAASLSAAVFGLGEASSAVAETVSGFFRGSSRWAGGFGVAGGAMALGGGIAAAVGAGMSLTDDAPAGQKAAVGAEIALQLTGGTVELASSIALALAAARGVTSGLQVAGASAGAAAGALAAALSPMEIYGLVQQSHYADQLDKLAQESSAYGYEGDALLAQLYRDKTAAEGAVAGVSAVLSTVGAAVSIAAAASVVGAPVAVVTSLLTGALNGILRGVQQPIIEKLANDYARKIDELGGPQAYFEKNLQARHEQLANSDGLRKMLADLQAGWNASSVIGVQTTEISKSALELAAITGNADNLKSADVFVDRFIQGERVAGQPVVLDVAAGGIDIASRKGERPALTFITPLAAPGEEQRRRTKTGKSEFTTFVEIVGKQDRWRIRDGAADTTIDLAKVVSQLVDANGVLKHSIKLEVIGGDGDDVVLANASRIHYDGGAGTNTVSYAALGRQDSITVSADGERFNVRKQLNNANVYREGVATQKTAYGKRTENVQYRHVELARVGQLVEVDTLEHVQHIIGGAGNDSITGNAHDNFLAGGAGDDRLDGGAGNDTLVGGEGHNTVVGGAGDDVFLQDLGVWSNQLDGGAGVDTVKYNVHQPSEERLERMGDTGIHADLQKGTVEKWPALNLFSVDHVKNIENLHGSSLNDSIAGDDRDNELWGDDGNDTIHGRGGDDILRGGLGLDTLYGEDGNDIFLQDDETVSDDIDGGAGLDTVDYSAMIHAGKIVAPHEYGFGIEADLSEGWVRKAARRGMGYYDSVRSVENVIGTSMKDVLIGDAQANTLMGQGGDDTVRGGDGDDLLFGGDGNDMLYGDAGNDTLYGGLGDDTLEGGAGNDWFGQTPAREHDVLRGGAGVDTVDYSQAGAHAGVATGRIGLGILADLGAGRVDKLGEAGSSAYDTVSGIENVVGTELADRITGDAQANVLRGAGGADVLAGGEGDDVLLGGEGDDQLSGDAGRDRLYGEAGDDWFFQDAANAGNLLDGGDGNDTVDFSGPGRGLDAGAKGVFLSLGKGFASLMDEPETSNVLRHIENAVGSVRDDVLIGDAGANVLNGLAGNDVLSGGAGDDVLLGDEGSDLLSGDAGNDDLFGGQGDDTYLFGAGYGHDTIYESGGGHDTIRINAGADQLWFARQGNDLEIRILGTDDALTVHDWYRDADHRVEAIHAANQAIDPAGIEKLVEAMAQYPDPGAAAAAPPAARVPDTLMQSLAVNWR

SEQ ID NO: 17 - protein, 1612 aa, Artificial Sequence
  Polypeptide 1-227 + 321-1705 of SEQ ID NO:8
MQQSHQAGYANAADRESGIPAAVLDGIKAVAKEKNATLMFRLVNPHSTSLIAEGVATKGLGVHAKSSDWGLQAGYIPVNPNLSKLFGRAPEVIARADNDVNSSLAHGHTAVDLTLSKERLDYLRQAGLVTGMADGVVASNHAGYEQFEFRVKETSDGRYAVQYRRKGGDDFEAVKVIGNAAGIPLTADIDMFAIMPHLSNFRDSARSSVTSGDSVTDYLARTRRAASESQMLTRGQLKEYIGQQRGEGYVFYENRAYGVAGKSLFDDGLGAAPGVPGRRSKSSPDVLETVPASPGLRRPSLGAVERQDSGYDSLDGVGSRSFSLGEVSDMAAVEAAELEMTRQVLHAGARQDDAEPGVSGASAHWGQRALQGAQAVAAAQRLVHAIALMTQFGRAGSTNTPQEAASLSAAVFGLGEASSAVAETVSGFFRGSSRWAGGFGVAGGAMALGGGIGAVGAGMSLTDDAPAGQKAAAGAEIALQLTGGTVELASSIALALAAARGVTSGLQVAGASAGAAAGALAAALSPMEIYGLVQQSHYADQLDKLAQESSAYGYEGDALLAQLYRDKTAAEGAVAGVSAVLSTVGAAVSIAAAASVVGAPVAVVTSLLTGALNGILRGVQQPIIEKLANDYARKIDELGGPQAYFEKNLQARHEQLANSDGLRKMLADLQAGWNASSVIGVQTTEISKSALELAAITGNADNLKSADVFVDRFIQGERVAGQPVVLDVAAGGIDIASRKGERPALTFITPLAAPGEEQRRRTKTGKSEFTTFVEIVGKQDRWRIRDGAADTTIDLAKVVSQLVDANGVLKHSIKLEVIGGDGDDVVLANASRIHYDGGAGTNTVSYAALGRQDSITVSADGERFNVRKQLNNANVYREGVATQKTAYGKRTENVQYRHVELARVGQLVEVDTLEHVQHIIGGAGNDSITGNAHDNFLAGGAGDDRLDGGAGNDTLVGGEGHNTVVGGAGDDVFLQDLGVWSNQLDGGAGVDTVKYNVHQPSEERLERMGDTGIHADLQKGTVEKWPALNLFSVDHVKNIENLHGSSLNDSIAGDDRDNELWGDDGNDTIHGRGGDDILRGGLGLDTLYGEDGNDIFLQDDETVSDDIDGGAGLDTVDYSAMIHAGKIVAPHEYGFGIEADLSEGWVRKAARRGMDYYDSVRSVENVIGTSMKDVLIGDAQANTLMGQGGDDTVRGGDGDDLLFGGDGNDMLYGDAGNDTLYGGLGDDTLEGGAGNDWFGQTPAREHDVLRGGAGVDTVDYSQAGAHAGVATGRIGLGILADLGAGRVDKLGEAGSSAYDTVSGIENVVGTELADRITGDAQANVLRGAGGADVLAGGEGDDVLLGGDGDDQLSGDAGRDRLYGEAGDDWFFQDAANAGNLLDGGDGNDTVDFSGPGRGLDAGAKGVFLSLGKGFASLMDEPETSNVLRHIENAVGSVRDDVLIGDAGANVLNGLAGNDVLSGGAGDDVLLGDEGSDLLSGDAGNDDLFGGQGDDTYLFGAGYGHDTIYESGGGHDTIRINAGADQLWFARQGNDLEIRILGTDDALTVHDWYRDADHRVEAIHAANQAIDPAGIEKLVEAMAQYPDPGAAAAAPPAARVPDTLMQSLAVNWR

SEQ ID NO: 18 - protein, 1502 aa, Artificial Sequence
  Polypeptide 1-183 + 387-1705 of SEQ ID NO:8
MQQSHQAGYANAADRESGIPAAVLDGIKAVAKEKNATLMFRLVNPHSTSLIAEGVATKGLGVHAKSSDWGLQAGYIPVNPNLSKLFGRAPEVIARADNDVNSSLAHGHTAVDLTLSKERLDYLRQAGLVTGMADGVVASNHAGYEQFEFRVKETSDGRYAVQYRRKGGDDFEAVKVIGNAAGIPGLRRPSLGAVERQDSGYDSLDGVGSRSFSLGEVSDMAAVEAAELEMTRQVLHAGARQDDAEPGVSGASAHWGQRALQGAQAVAAAQRLVHAIALMTQFGRAGSTNTPQEAASLSAAVFGLGEASSAVAETVSGFFRGSSRWAGGFGVAGGAMALGGGIGAVGAGMSLTDDAPAGQKAAAGAEIALQLTGGTVELASSIALALAAARGVTSGLQVAGASAGAAAGALAAALSPMEIYGLVQQSHYADQLDKLAQESSAYGYEGDALLAQLYRDKTAAEGAVAGVSAVLSTVGAAVSIAAAASVVGAPVAVVTSLLTGALNGILRGVQQPIIEKLANDYARKIDELGGPQAYFEKNLQARHEQLANSDGLRKMLADLQAGWNASSVIGVQTTEISKSALELAAITGNADNLKSADVFVDRFIQGERVAGQPVVLDVAAGGIDIASRKGERPALTFITPLAAPGEEQRRRTKTGKSEFTTFVEIVGKQDRWRIRDGAADTTIDLAKVVSQLVDANGVLKHSIKLEVIGGDGDDVVLANASRIHYDGGAGTNTVSYAALGRQDSITVSADGERFNVRKQLNNANVYREGVATQKTAYGKRTENVQYRHVELARVGQLVEVDTLEHVQHIIGGAGNDSITGNAHDNFLAGGAGDDRLDGGAGNDTLVGGEGHNTVVGGAGDDVFLQDLGVWSNQLDGGAGVDTVKYNVHQPSEERLERMGDTGIHADLQKGTVEKWPALNLFSVDHVKNIENLHGSSLNDSIAGDDRDNELWGDDGNDTIHGRGGDDILRGGLGLDTLYGEDGNDIFLQDDETVSDDIDGGAGLDTVDYSAMIHAGKIVAPHEYGFGIEADLSEGWVRKAARRGMDYYDSVRSVENVIGTSMKDVLIGDAQANTLMGQGGDDTVRGGDGDDLLFGGDGNDMLYGDAGNDTLYGGLGDDTLEGGAGNDWFGQTPAREHDVLRGGAGVDTVDYSQAGAHAGVATGRIGLGILADLGAGRVDKLGEAGSSAYDTVSGIENVVGTELADRITGDAQANVLRGAGGADVLAGGEGDDVLLGGDGDDQLSGDAGRDRLYGEAGDDWFFQDAANAGNLLDGGDGNDTVDFSGPGRGLDAGAKGVFLSLGKGFASLMDEPETSNVLRHIENAVGSVRDDVLIGDAGANVLNGLAGNDVLSGGAGDDVLLGDEGSDLLSGDAGNDDLFGGQGDDTYLFGAGYGHDTIYESGGGHDTIRINAGADQLWFARQGNDLEIRILGTDDALTVHDWYRDADHRVEAIHAANQAIDPAGIEKLVEAMAQYPDPGAAAAAPPAARVPDTLMQSLAVNWR

SEQ ID NO: 19 - protein, 1547 aa, Artificial Sequence
  Polypeptide 1-227 + 387-1706 of SEQ ID NO:2
MQQSHQAGYANAADRESGIPAAVLDGIKAVAKEKNATLMFRLVNPHSTSLIAEGVATKGLGVHAKSSDWGLQAGYIPVNPNLSKLFGRAPEVIARADNDVNSSLAHGHTAVDLTLSKERLDYLRQAGLVTGMADGVVASNHAGYEQFEFRVKETSDGRYAVQYRRKGGDDFEAVKVIGNAAGIPLTADIDMFAIMPHLSNFRDSARSSVTSGDSVTDYLARTRRAASPGLRRPSLGAVERQDSGYDSLDGVGSRSFSLGEVSDMAAVEAAELEMTRQVLHAGARQDDAEPGVSGASAHWGQRALQGAQAVAAAQRLVHAIALMTQFGRAGSTNTPQEAASLSAAVFGLGEASSAVAETVSGFFRGSSRWAGGFGVAGGAMALGGGIAAAVGAGMSLTDDAPAGQKAAAGAEIALQLTGGTVELASSIALALAAARGVTSGLQVAGASAGAAAGALAAALSPMEIYGLVQQSHYADQLDKLAQESSAYGYEGDALLAQLYRDKTAAEGAVAGVSAVLSTVGAAVSIAAAASVVGAPVAVVTSLLTGALNGILRGVQQPIIEKLANDYARKIDELGGPQAYFEKNLQARHEQLANSDGLRKMLADLQAGWNASSVIGVQTTEISKSALELAAITGNADNLKSVDVFVDRFVQGERVAGQPVVLDVAAGGIDIASRKGERPALTFITPLAAPGEEQRRRTKTGKSEFTTFVEIVGKQDRWRIRDGAADTTIDLAKVVSQLVDANGVLKHSIKLDVIGGDGDDVVLANASRIHYDGGAGTNTVSYAALGRQDSITVSADGERFNVRKQLNNANVYREGVATQTTAYGKRTENVQYRHVELARVGQLVEVDTLEHVQHIIGGAGNDSITGNAHDNFLAGGSGDDRLDGGAGNDTLVGGEGQNTVIGGAGDDVFLQDLGVWSNQLDGGAGVDTVKYNVHQPSEERLERMGDTGIHADLQKGTVEKWPALNLFSVDHVKNIENLHGSRLNDRIAGDDQDNELWGHDGNDTIRGRGGDDILRGGLGLDTLYGEDGNDIFLQDDETVSDDIDGGAGLDTVDYSAMIHPGRIVAPHEYGFGIEADLSREWVRKASALGVDYYDNVRNVENVIGTSMKDVLIGDAQANTLMGQGGDDTVRGGDGDDLLFGGDGNDMLYGDAGNDTLYGGLGDDTLEGGAGNDWFGQTQAREHDVLRGGDGVDTVDYSQTGAHAGIAAGRIGLGILADLGAGRVDKLGEAGSSAYDTVSGIENVVGTELADRITGDAQANVLRGAGGADVLAGGEGDDVLLGGDGDDQLSGDAGRDRLYGEAGDDWFFQDAANAGNLLDGGDGRDTVDFSGPGRGLDAGAKGVFLSLGKGFASLMDEPETSNVLRNIENAVGSARDDVLIGDAGANVLNGLAGNDVLSGGAGDDVLLGDEGSDLLSGDAGNDDLFGGQGDDTYLFGVGYGHDTIYESGGGHDTIRINAGADQLWFARQGNDLEIRILGTDDALTVHDWYRDADHRVEIIHAANQAVDQAGIEKLVEAMAQYPDPGAAAAAPPAARVPDTLMQSLAVNWR

SEQ ID NO: 20 - protein, 1569 aa, Artificial Sequence
  polypeptide 1-183 + 321-1706 of SEQ ID NO:2
MQQSHQAGYANAADRESGIPAAVLDGIKAVAKEKNATLMFRLVNPHSTSLIAEGVATKGLGVHAKSSDWGLQAGYIPVNPNLSKLFGRAPEVIARADNDVNSSLAHGHTAVDLTLSKERLDYLRQAGLVTGMADGVVASNHAGYEQFEFRVKETSDGRYAVQYRRKGGDDFEAVKVIGNAAGIESQMLTRGQLKEYIGQQRGEGYVFYENRAYGVAGKSLFDDGLGAAPGVPSGRSKFSPDVLETVPASPGLRRPSLGAVERQDSGYDSLDGVGSRSFSLGEVSDMAAVEAAELEMTRQVLHAGARQDDAEPGVSGASAHWGQRALQGAQAVAAAQRLVHAIALMTQFGRAGSTNTPQEAASLSAAVFGLGEASSAVAETVSGFFRGSSRWAGGFGVAGGAMALGGGIAAAVGAGMSLTDDAPAGQKAAAGAEIALQLTGGTVELASSIALALAAARGVTSGLQVAGASAGAAAGALAAALSPMEIYGLVQQSHYADQLDKLAQESSAYGYEGDALLAQLYRDKTAAEGAVAGVSAVLSTVGAAVSIAAAASVVGAPVAVVTSLLTGALNGILRGVQQPIIEKLANDYARKIDELGGPQAYFEKNLQARHEQLANSDGLRKMLADLQAGWNASSVIGVQTTEISKSALELAAITGNADNLKSVDVFVDRFVQGERVAGQPVVLDVAAGGIDIASRKGERPALTFITPLAAPGEEQRRRTKTGKSEFTTFVEIVGKQDRWRIRDGAADTTIDLAKVVSQLVDANGVLKHSIKLDVIGGDGDDVVLANASRIHYDGGAGTNTVSYAALGRQDSITVSADGERFNVRKQLNNANVYREGVATQTTAYGKRTENVQYRHVELARVGQLVEVDTLEHVQHIIGGAGNDSITGNAHDNFLAGGSGDDRLDGGAGNDTLVGGEGQNTVIGGAGDDVFLQDLGVWSNQLDGGAGVDTVKYNVHQPSEERLERMGDTGIHADLQKGTVEKWPALNLFSVDHVKNIENLHGSRLNDRIAGDDQDNELWGHDGNDTIRGRGGDDILRGGLGLDTLYGEDGNDIFLQDDETVSDDIDGGAGLDTVDYSAMIHPGRIVAPHEYGFGIEADLSREWVRKASALGVDYYDNVRNVENVIGTSMKDVLIGDAQANTLMGQGGDDTVRGGDGDDLLFGGDGNDMLYGDAGNDTLYGGLGDDTLEGGAGNDWFGQTQAREHDVLRGGDGVDTVDYSQTGAHAGIAAGRIGLGILADLGAGRVDKLGEAGSSAYDTVSGIENVVGTELADRITGDAQANVLRGAGGADVLAGGEGDDVLLGGDGDDQLSGDAGRDRLYGEAGDDWFFQDAANAGNLLDGGDGRDTVDFSGPGRGLDAGAKGVFLSLGKGFASLMDEPETSNVLRNIENAVGSARDDVLIGDAGANVLNGLAGNDVLSGGAGDDVLLGDEGSDLLSGDAGNDDLFGGQGDDTYLFGVGYGHDTIYESGGGHDTIRINAGADQLWFARQGNDLEIRILGTDDALTVHDWYRDADHRVEIIHAANQAVDQAGIEKLVEAMAQYPDPGAAAAAPPAARVPDTLMQSLAVNWR

SEQ ID NO: 21 - DNA, 558 bp, Bordetella pertussis
atgcttccgtccgcccaagcgccctccctcctcaatcccaccgacgacttcgcggcactgggcaatattgcctggctgtggatgaactctcccatgcaccgcgactggccggtgcatctgctcgcacgcaacacgctcgcgccgattcaactgggccaatacattctgctgcgatgcaatgacgtgccggttgcatactgcagctgggccctaatggacgccgacaccgaactctcctatgtcatggcgccctcgtcgctgggcgggaatgcctggaactgcggcgaccgactgtggatcatcgactggatcgcgccattctcgcgcgacgacaatcgtgcgctgcgccgcgcgctggccgaacggcaccccgacagcgtgggccgttcgctgcgcgttcggcgcggcggcgacaccgcgcgcgtcaaggagtaccgaggccgcgcgctggacgcggccgccgctcgcgcgcagctggaccgctaccatgccgaactgatcgcaggactgcgcgcgagcaacggcggatacgcgccgcgaggccggggcaccgcctga

SEQ ID NO: 22 - DNA, 558 bp, Artificial Sequence
  Optimized version of CyaC nucleotide coding sequence
  CDS (1)..(558)
atgctgccgtctgcacaggcgccgtctctgctgaatccaactgatgacttcgctgcgctgggtaacatcgcgtggctgtggatgaacagcccgatgcaccgtgactggccggttcacctgctggcacgtaacacgctggcgccgatccagctgggtcaatacatcctgctgcgttgtaacgacgtgcctgtggcgtattgctcctgggcactgatggatgcggataccgagctgtcctacgttatggccccatctagcctgggcggtaacgcttggaactgcggcgatcgtctgtggatcattgattggattgctccgtttagccgtgacgacaaccgtgctctgcgtcgcgcgctggccgaacgtcatccggattctgttggccgttccctgcgcgtacgtcgcggtggcgacaccgctcgcgtcaaagaataccgtggtcgtgctctggacgcagcggcggcccgcgctcagctggaccgctaccacgcagaactgattgccggtctgcgtgcatccaatggcggttatgctccgcgtggccgtggcaccgcataa

SEQ ID NO: 23 - protein, 185 aa, Artificial Sequence
  Synthetic Construct
MLPSAQAPSLLNPTDDFAALGNIAWLWMNSPMHRDWPVHLLARNTLAPIQLGQYILLRCNDVPVAYCSWALMDADTELSYVMAPSSLGGNAWNCGDRLWIIDWIAPFSRDDNRALRRALAERHPDSVGRSLRVRRGGDTARVKEYRGRALDAAAARAQLDRYHAELIAGLRASNGGYAPRGRGTA

SEQ ID NO: 24 - protein, 441 aa, Artificial Sequence
  Model antigen (peptide 105)
MGIRSRDHMVLHEYVNAAGITGSDRMEVGWYRSPFSRVVHLYRNGKSIINFEKLVRVDMVRHRIKEHMLKKYTQIYSTVASSLSGEKISQAVHAAHAEINEAGRELAGIGILTVPKYVKQNTLKLATKAVYNFATCSGRKVAELVHFLLLKYRAREPVTKAEMLGSVVGNWQYFFPVIFSKASSSLQLVFGIELMEVDPIGHLYIFATKLLTQHFVQENYLEYRQVPGSDPACYEFLWGPRALVETSYVKTGMHGDTPTLHEYMLDLQPETTDLYCYEQLNGPAGQAEPDRAHYNIVTFCCKCDSTLRLCVQSTHVDIRTLEDLLMGTLGIVCPICSQKPMHGPKATLQDIVLHLEPQNEIPVDLLCHEQLSASGVNHQHLPARRAEPQRHTMLCMCCKCEARIELVVESSADDLRAFQQLFLNTLSFVCPWCASQQLKGP

SEQ ID NO: 25 - protein, 98 aa, Artificial Sequence
  Protein sequence of E7 of HPV16
MHGDTPTLHEYMLDLQPETTDLYCYEQLNDSSEEEDEIDGPAGQAEPDRAHYNIVTFCCKCDSTLRLCVQSTHVDIRTLEDLLMGTLGIVCPICSQKP

SEQ ID NO: 26 - protein, 105 aa, Artificial Sequence
  Protein sequence of E7 of HPV18
MHGPKATLQDIVLHLEPQNEIPVDLLCHEQLSDSEEENDEIDGVNHQHLPARRAEPQRHTMLCMCCKCEARIELVVESSADDLRAFQQLFLNTLSFVCPWCASQQ

SEQ ID NO: 27 - protein, 98 aa, Artificial Sequence
  Protein sequence of E7 of HPV31
MRGETPTLQDYVLDLQPEATDLYCYEQLPDSSDEEDVIDSPAGQAKPDTSNYNIVTFCCQCESTLRLCVQSTQVDIRILQELLMGSFGIVCPNCSTRL

SEQ ID NO: 28 - protein, 97 aa, Artificial Sequence
  Protein sequence of E7 of HPV33
MRGHKPTLKEYILDLYPEPTDLYCYEQLSDSSDEDEGLDRPDGQAQPATADYYIVTCCHTCNTTVRLCVNSTASDLRTIQQLLMGTVNIVCPSCAQL

SEQ ID NO: 29 - protein, 106 aa, Artificial Sequence
  Protein sequence of E7 of HPV45
MHGPRETLQEIVLHLEPQNELDPVDLLCYEQLSESEEENDEADGVSHAQLPARRAEPQRHKILCVCCKCDGRIELTVESSAEDLRTLQQLFLSTLSFVCPWCATNQ

SEQ ID NO: 30 - protein, 99 aa, Artificial Sequence
  Protein sequence of E7 of HPV52
MRGDKATIKDYILDLQPETTDLHCYEQLGDSSDEEDTDGVDRPDGQAEQATSNYYIVTYCHSCDSTLRLCIHSTATDLRTLQQMLLGTLQVVCPGCARL

SEQ ID NO: 31 - protein, 99 aa, Artificial Sequence
  Modified version of protein sequence of E7 of HPV52
MRGDKATIKDYILDLQPETTDLHCYEQLGDSSDEEDTDGVDRPDGQAEQATSNYYIVTYCHSCDSTLRLCIHSTATDLRTLQQLLMGTLQVVCPGCARL

SEQ ID NO: 32 - protein, 98 aa, Artificial Sequence
  Protein sequence of E7 of HPV 58
MRGNNPTLREYILDLHPEPTDLFCYEQLCDSSDEDEIGLDRPDGQAQPATANYYIVTCCYTCDTTVRLCINSTTTDVRTLQQLLMGTCTIVCPSCAQQ

SEQ ID NO: 33 - DNA, 828 bp, Artificial Sequence
  polynucleotide for antigen E7 of HPV16, HVP18 and HPV45 acidic-deleted
  CDS (1)..(828)
ggtcaggcggaaccggatcgcgcgcactacaacatcgttactttttgttgcaaatgtgattccactctgcgcctgtgtgtgcaatccacccacgtagacattcgcactctggaagacctgctgatgggtacccttggtattgtttgtccgatttgctcccagaagccggcgtctggcgttaaccaccaacacctgccggcgcgtcgcgcagagccgcagcgtcacaccatgctgtgcatgtgctgtaaatgtgaggcccgtatcgagctggtcgttgagtctagcgccgacgatctgcgtgcgtttcagcagctgttcctgaacacgctgagcttcgtttgcccgtggtgtgctagccagcagggcgtgtctcacgctcagctgccggcacgtcgtgctgagcctcagcgtcacaaaatcctgtgcgtgtgctgcaaatgcgatggccgcatcgaactgaccgtggaatctagcgcagaagacctgcgtacgctgcagcaactgttcctgagcacgctgtccttcgtatgcccttggtgcgcaactaatcagatgcacggtgacaccccgaccctgcacgaatacatgctggacctgcagccagaaaccaccgatctgtactgttacgaacagctgaacatgcatggcccaaaagctactctgcaggatatcgtcctgcatctggaaccacagaacgaaatcccggtagatctgctgtgccatgagcagctgatgcatggtccgcgtgaaaccctgcaggaaatcgttctgcacctggaaccgcaaaacgaactggacccggttgacctgctgtgctatgaacagctg

SEQ ID NO: 34 - protein, 276 aa, Artificial Sequence
  Synthetic Construct
GQAEPDRAHYNIVTFCCKCDSTLRLCVQSTHVDIRTLEDLLMGTLGIVCPICSQKPASGVNHQHLPARRAEPQRHTMLCMCCKCEARIELVVESSADDLRAFQQLFLNTLSFVCPWCASQQGVSHAQLPARRAEPQRHKILCVCCKCDGRIELTVESSAEDLRTLQQLFLSTLSFVCPWCATNQMHGDTPTLHEYMLDLQPETTDLYCYEQLNMHGPKATLQDIVLHLEPQNEIPVDLLCHEQLMHGPRETLQEIVLHLEPQNELDPVDLLCYEQL

SEQ ID NO: 35 - DNA, 933 bp, Artificial Sequence
  Polynucleotide for antigen E7 of HPV16, HPV18 and HPV45 full
  CDS (1)..(933)
gaagacgaaatcgacggccctgcgggccaggctgaaccagatcgtgctcactacaacatcgtaactttttgctgtaagtgcgatagcactctgcgtctgtgcgtacagtctactcacgttgatatccgcactctggaagatctgctgatgggtaccctgggtatcgtctgcccaatctgctctcaaaagcctgcttctggtgttaaccatcagcacctgccggctcgtcgcgctgaaccacagcgtcataccatgctgtgcatgtgttgcaaatgcgaggctcgcatcgaactggttgttgaatccagcgctgacgacctgcgtgcgtttcagcaactgttcctgaacacgctgtcttttgtttgtccgtggtgtgcctcccagcaggagaacgatgaagcggatggcgtgtcccacgcgcagctgccggcacgtcgtgcagaaccgcagcgccacaagattctgtgcgtttgctgtaaatgtgatggccgtatcgaactgactgtggaatcctccgcggaagatctgcgtacgctgcagcagctgttcctgtctaccctgtctttcgtgtgcccgtggtgcgccaccaatcaaatgcacggcgacaccccgaccctgcacgaatacatgctggacctgcagccggaaaccacggatctgtattgttatgaacagctgaacgatagcagcgaggaaatgcacggtccgaaagcaactctgcaggacattgtgctgcatctggagccacagaacgaaatcccggttgatctgctgtgccacgagcaactgagcgattccgaagaggaaaacgacgaaattgatatgcatggtccgcgcgagaccctgcaagaaatcgtcctgcacctggaaccgcaaaacgaactggaccctgtagacctgctgtgctacgaacagctgtccgaatctgaagaa

SEQ ID NO: 36 - protein, 311 aa, Artificial Sequence
  Synthetic Construct
EDEIDGPAGQAEPDRAHYNIVTFCCKCDSTLRLCVQSTHVDIRTLEDLLMGTLGIVCPICSQKPASGVNHQHLPARRAEPQRHTMLCMCCKCEARIELVVESSADDLRAFQQLFLNTLSFVCPWCASQQENDEADGVSHAQLPARRAEPQRHKILCVCCKCDGRIELTVESSAEDLRTLQQLFLSTLSFVCPWCATNQMHGDTPTLHEYMLDLQPETTDLYCYEQLNDSSEEMHGPKATLQDIVLHLEPQNEIPVDLLCHEQLSDSEEENDEIDMHGPRETLQEIVLHLEPQNELDPVDLLCYEQLSESEE

SEQ ID NO: 37 - DNA, 1011 bp, Artificial Sequence
  polynucleotide for antigen E7 of HPV31, 33, 52 and 58 acidic-deleted
  CDS (1)..(1011)
gcgggtcaagcgaagccggatacgagcaactataacattgtcacgttctgctgccagtgtgaaagcaccttgcgtctgtgtgtccagagcacccaagttgacatccgtattctgcaggagttgctgatgggcagctttggcatcgtgtgcccgaattgcagcactcgcctgggtcaggcacagccggccaccgctgactactacattgttacttgttgccatacctgcaataccacggtccgcctgtgcgtcaattccaccgcttccgacttgcgtaccattcagcaactgctgatgggcacggttaacatcgtttgcccgtcttgtgcgcagctgggccaagcggaacaggcgacgagcaattactacatcgtgacttactgtcactcgtgtgacagcacgctgcgtttgtgcattcacagcaccgcgaccgatctgcgtacgctgcaacaattgctgatgggtaccctgcaggtggtgtgccctggttgcgcacgtctgggtcaagctcaaccggcaaccgcgaactactatatcgttacgtgttgttatacgtgtgataccaccgttcgtctgtgcatcaacagcaccaccaccgatgtccgcacgctgcaacaactgctgatgggtacgtgtacgattgtttgcccgagctgtgcccagcaaatgcgtggtgaaaccccaacgctgcaggactacgtgctggatttgcagccggaagcaaccgacctgtactgctacgagcagctgatgcgtggtcacaagccgacgctgaaagagtatatcttggacctgtatccggagcctaccgatctgtattgctatgaacagctgagcatgcgtggcgataaggcgaccatcaaagactacattctggacttgcagccggaaaccacggatctgcattgctacgaacaactgggcatgcgcggtaacaatccgaccctgcgcgagtatatcctggatctgcacccagagccgactgacctgttctgctatgagcagttgtgc

SEQ ID NO: 38 - protein, 337 aa, Artificial Sequence
  Synthetic Construct
AGQAKPDTSNYNIVTFCCQCESTLRLCVQSTQVDIRILQELLMGSFGIVCPNCSTRLGQAQPATADYYIVTCCHTCNTTVRLCVNSTASDLRTIQQLLMGTVNIVCPSCAQLGQAEQATSNYYIVTYCHSCDSTLRLCIHSTATDLRTLQQLLMGTLQVVCPGCARLGQAQPATANYYIVTCCYTCDTTVRLCINSTTTDVRTLQQLLMGTCTIVCPSCAQQMRGETPTLQDYVLDLQPEATDLYCYEQLMRGHKPTLKEYILDLYPEPTDLYCYEQLSMRGDKATIKDYILDLQPETTDLHCYEQLGMRGNNPTLREYILDLHPEPTDLFCYEQLC

SEQ ID NO: 39 - DNA, 1176 bp, Artificial Sequence
  polynucleotide for antigen E7 of HPV31, 33, 52 and 58 full
  CDS (1)..(1176)
gatgaagaggatgtcatcgattccccagcaggccaagcaaagccggacaccagcaattacaatatcgtgaccttctgctgccaatgtgagtccactctgcgtctgtgcgttcagagcacccaggttgacattcgtattctgcaagaattgttgatgggtagctttggcattgtgtgtccgaactgcagcacccgtctgtcggatgaagatgaaggtctggatcgtccggatggtcaagcgcagccggcgactgcagattactatatcgtcacttgttgccacacctgcaataccaccgtgcgtctgtgtgtgaacagcacggcgagcgacctgcgcacgatccaacagttgttgatgggcaccgtgaatatcgtctgcccaagctgtgctcagttgagcgatgaagaggacaccgacggtgtcgaccgtccggacggccaagctgagcaggcgaccagcaactactatatcgttacgtactgtcacagctgcgatagcactctgcgcctgtgtattcatagcacggccaccgatctgcgtaccctgcaacaactgctgatgggtactctgcaggttgtgtgcccaggttgtgctcgtctgtccgacgaggacgaaatcggcctggaccgtcctgatggccaggcccagccggcaacggcgaactattacattgtgacctgctgctatacgtgcgataccacggtccgtctgtgcattaactctaccaccacggatgttcgcacgctgcagcaactgctgatgggtacctgtaccattgtttgcccgtcttgtgcccagcagatgcgcggtgaaacgccgaccctgcaggattatgttctggacctgcaaccggaggcgaccgatctgtattgctacgagcaactgccggacagctcgatgcgtggtcacaaaccgacgctgaaagagtacatcctggacctgtacccggaacctacggatctgtactgttatgaacaactgagcgatagcatgcgtggtgacaaggcgacgattaaggactacatcttggatctgcagccggaaaccaccgacctgcactgctatgagcagctgggtgattctatgcgcggtaacaatccgaccctgcgcgagtacattctggacttgcatccggaaccgacggacctgttctgttacgagcagctgtgtgacagc

SEQ ID NO: 40 - protein, 392 aa, Artificial Sequence
  Synthetic Construct
DEEDVIDSPAGQAKPDTSNYNIVTFCCQCESTLRLCVQSTQVDIRILQELLMGSFGIVCPNCSTRLSDEDEGLDRPDGQAQPATADYYIVTCCHTCNTTVRLCVNSTASDLRTIQQLLMGTVNIVCPSCAQLSDEEDTDGVDRPDGQAEQATSNYYIVTYCHSCDSTLRLCIHSTATDLRTLQQLLMGTLQVVCPGCARLSDEDEIGLDRPDGQAQPATANYYIVTCCYTCDTTVRLCINSTTTDVRTLQQLLMGTCTIVCPSCAQQMRGETPTLQDYVLDLQPEATDLYCYEQLPDSSMRGHKPTLKEYILDLYPEPTDLYCYEQLSDSMRGDKATIKDYILDLQPETTDLHCYEQLGDSMRGNNPTLREYILDLHPEPTDLFCYEQLCDS

SEQ ID NO: 41 - DNA, 759 bp, Artificial Sequence
  polynucleotide for antigen E7 of HPV31, 52 and 58 acidic-deleted
  CDS (1)..(759)
gcgggtcaagccaaaccggatacctccaactacaacattgtgaccttctgttgtcaatgcgagagcacgctgcgtctgtgtgttcaaagcacccaggttgacattcgtatcctgcaagaactgctgatgggctcttttggcatcgtctgcccaaattgcagcactcgcctgggccaggcggagcaggcgacgagcaactactacattgtcacgtattgccattcctgtgatagcactctgcgtctgtgtatccacagcacggcaaccgatctgcgtaccttgcaacaactgctgatgggcaccctgcaggtggtttgtccgggttgcgctcgcctgggccaggcgcagccagcgacggccaattactacatcgttacctgttgctatacgtgcgatactaccgtccgtctgtgcattaacagcaccaccacggacgtgcgtaccctgcaacagctgctgatgggtacctgcacgattgtttgtccgagctgtgcacaacaaatgcgtggtgaaacgccgaccctgcaggattatgtgttggacttgcagccggaggcaacggacctgtactgctatgagcagctgatgcgtggtgacaaggccaccattaaagattacatcctggacttgcaaccggaaaccaccgacctgcactgctatgagcagctgggtatgcgcggtaataacccgaccttgcgtgagtatatcttggacctgcacccggagccgaccgatctgttctgttacgaacagctgtgc

SEQ ID NO: 42 - protein, 253 aa, Artificial Sequence
  Synthetic Construct
AGQAKPDTSNYNIVTFCCQCESTLRLCVQSTQVDIRILQELLMGSFGIVCPNCSTRLGQAEQATSNYYIVTYCHSCDSTLRLCIHSTATDLRTLQQLLMGTLQVVCPGCARLGQAQPATANYYIVTCCYTCDTTVRLCINSTTTDVRTLQQLLMGTCTIVCPSCAQQMRGETPTLQDYVLDLQPEATDLYCYEQLMRGDKATIKDYILDLQPETTDLHCYEQLGMRGNNPTLREYILDLHPEPTDLFCYEQLC

SEQ ID NO: 43 - DNA, 885 bp, Artificial Sequence
  polynucleotide for antigen E7 of HPV31, 52 and 58 full
  CDS (1)..(885)
gatgaagaggatgtcatcgattccccagcaggccaagcaaagccggacaccagcaattacaatatcgtgaccttctgctgccaatgtgagtccactctgcgtctgtgcgttcagagcacccaggttgacattcgtattctgcaagaattgttgatgggtagctttggcattgtgtgtccgaactgcagcacccgtctgagcgatgaagaggacaccgacggtgtcgaccgtccggacggccaagctgagcaggcgaccagcaactactatatcgttacgtactgtcacagctgcgatagcactctgcgcctgtgtattcatagcacggccaccgatctgcgtaccctgcaacaactgctgatgggtactctgcaggttgtgtgcccaggttgtgctcgtctgtccgacgaggacgaaatcggcctggaccgtcctgatggccaggcccagccggcaacggcgaactattacattgtgacctgctgctatacgtgcgataccacggtccgtctgtgcattaactctaccaccacggatgttcgcacgctgcagcaactgctgatgggtacctgtaccattgtttgcccgtcttgtgcccagcagatgcgcggtgaaacgccgaccctgcaggattatgttctggacctgcaaccggaggcgaccgatctgtattgctacgagcaactgccggacagctcgatgcgtggtgacaaggcgacgattaaggactacatcttggatctgcagccggaaaccaccgacctgcactgctatgagcagctgggtgattctatgcgcggtaacaatccgaccctgcgcgagtacattctggacttgcatccggaaccgacggacctgttctgttacgagcagctgtgtgacagc

SEQ ID NO: 44 - protein, 295 aa, Artificial Sequence
  Synthetic Construct
DEEDVIDSPAGQAKPDTSNYNIVTFCCQCESTLRLCVQSTQVDIRILQELLMGSFGIVCPNCSTRLSDEEDTDGVDRPDGQAEQATSNYYIVTYCHSCDSTLRLCIHSTATDLRTLQQLLMGTLQVVCPGCARLSDEDEIGLDRPDGQAQPATANYYIVTCCYTCDTTVRLCINSTTTDVRTLQQLLMGTCTIVCPSCAQQMRGETPTLQDYVLDLQPEATDLYCYEQLPDSSMRGDKATIKDYILDLQPETTDLHCYEQLGDSMRGNNPTLREYILDLHPEPTDLFCYEQLCDS

SEQ ID NO: 45 - DNA, 759 bp, Artificial Sequence
  polynucleotide for antigen E7 of HPV31, 33 and 52 acidic-deleted
  CDS (1)..(759)
gcgggtcaagccaaaccggatacctccaactacaacattgtgaccttctgttgtcaatgcgagagcacgctgcgtctgtgtgttcaaagcacccaggttgacattcgtatcctgcaagaactgctgatgggctcttttggcatcgtctgcccaaattgcagcactcgcctgggtcaggcgcaaccggccacggcggactactatatcgtgacctgttgccacacctgcaacactaccgttcgcttgtgtgtcaatagcaccgcttccgatctgcgtaccattcaacaactgctgatgggtaccgttaacatcgtgtgcccgagctgcgcacagctgggccaggcggagcaggcgacgagcaactactacattgtcacgtattgccattcctgtgatagcactctgcgtctgtgtatccacagcacggcaaccgatctgcgtaccttgcaacaactgctgatgggcaccctgcaggtggtttgtccgggttgcgctcgcctgatgcgtggtgaaacgccgaccctgcaggattatgtgttggacttgcagccggaggcaacggacctgtactgctatgagcagctgatgcgtggccataagccgacgctgaaagagtatattctggacctgtacccagagccgacggatttgtactgttatgaacagctgagcatgcgtggtgacaaggccaccattaaagattacatcctggacttgcaaccggaaaccaccgacctgcactgctatgagcagctgggt

SEQ ID NO: 46 - protein, 253 aa, Artificial Sequence
  Synthetic Construct
AGQAKPDTSNYNIVTFCCQCESTLRLCVQSTQVDIRILQELLMGSFGIVCPNCSTRLGQAQPATADYYIVTCCHTCNTTVRLCVNSTASDLRTIQQLLMGTVNIVCPSCAQLGQAEQATSNYYIVTYCHSCDSTLRLCIHSTATDLRTLQQLLMGTLQVVCPGCARLMRGETPTLQDYVLDLQPEATDLYCYEQLMRGHKPTLKEYILDLYPEPTDLYCYEQLSMRGDKATIKDYILDLQPETTDLHCYEQLG

SEQ ID NO: 47 - DNA, 882 bp, Artificial Sequence
  polynucleotide for antigen E7 of HPV31, 33 and 52 full
  CDS (1)..(882)
gatgaagaggatgtcatcgattccccagcaggccaagcaaagccggacaccagcaattacaatatcgtgaccttctgctgccaatgtgagtccactctgcgtctgtgcgttcagagcacccaggttgacattcgtattctgcaagaattgttgatgggtagctttggcattgtgtgtccgaactgcagcacccgtctgtcggatgaagatgaaggtctggatcgtccggatggtcaagcgcagccggcgactgcagattactatatcgtcacttgttgccacacctgcaataccaccgtgcgtctgtgtgtgaacagcacggcgagcgacctgcgcacgatccaacagttgttgatgggcaccgtgaatatcgtctgcccaagctgtgctcagttgagcgatgaagaggacaccgacggtgtcgaccgtccggacggccaagctgagcaggcgaccagcaactactatatcgttacgtactgtcacagctgcgatagcactctgcgcctgtgtattcatagcacggccaccgatctgcgtaccctgcaacaactgctgatgggtactctgcaggttgtgtgcccaggttgtgctcgtctgatgcgcggtgaaacgccgaccctgcaggattatgttctggacctgcaaccggaggcgaccgatctgtattgctacgagcaactgccggacagctcgatgcgtggtcacaaaccgacgctgaaagagtacatcctggacctgtacccggaacctacggatctgtactgttatgaacaactgagcgatagcatgcgtggtgacaaggcgacgattaaggactacatcttggatctgcagccggaaaccaccgacctgcactgctatgagcagctgggtgattct

SEQ ID NO: 48 - protein, 294 aa, Artificial Sequence
  Synthetic Construct
DEEDVIDSPAGQAKPDTSNYNIVTFCCQCESTLRLCVQSTQVDIRILQELLMGSFGIVCPNCSTRLSDEDEGLDRPDGQAQPATADYYIVTCCHTCNTTVRLCVNSTASDLRTIQQLLMGTVNIVCPSCAQLSDEEDTDGVDRPDGQAEQATSNYYIVTYCHSCDSTLRLCIHSTATDLRTLQQLLMGTLQVVCPGCARLMRGETPTLQDYVLDLQPEATDLYCYEQLPDSSMRGHKPTLKEYILDLYPEPTDLYCYEQLSDSMRGDKATIKDYILDLQPETTDLHCYEQLGDS

SEQ ID NO: 49 - DNA, 1080 bp, Artificial Sequence
  polynucleotide for antigen E7 of HPV16, 18, 33 and 45 acidic-deleted
  CDS (1)..(1080)
ggtcaggcggaaccggatcgcgcgcactacaacatcgttactttttgttgcaaatgtgattccactctgcgcctgtgtgtgcaatccacccacgtagacatccgcactctggaagacctgctgatgggtaccctgggtattgtttgtccgatttgctcccagaagccggcgtctggcgttaaccaccaacacctgccggcgcgtcgcgcagagccgcagcgtcacaccatgctgtgcatgtgctgtaaatgtgaggcccgtattgaactggtcgttgagtctagcgccgacgatctgcgtgcgtttcagcagctgttcctgaacacgctgagcttcgtttgcccgtggtgtgctagccagcagggcgtgtctcacgctcagctgccggcacgtcgtgctgagcctcagcgtcacaaaatcctgtgcgtgtgctgcaaatgcgatggccgcatcgaactgaccgtggaatctagcgcagaagacctgcgtacgctgcagcaactgttcctgagcacgctgtccttcgtatgcccttggtgcgcaactaatcagggtcaggcgcaaccggccacggcggactactatatcgtgacctgttgccacacctgcaacactaccgttcgcttgtgtgtcaatagcaccgcttccgatctgcgtaccattcaacaactgctgatgggtaccgttaacatcgtgtgcccgagctgcgcacagctgatgcacggtgacaccccgaccctgcacgaatacatgctggacctgcagccagaaaccaccgatctgtactgttacgaacagctgaacatgcatggcccaaaagctactctgcaggatatcgtcctgcatctggaaccacagaacgaaatcccggtagatctgctgtgccatgagcagctgatgcatggtccgcgtgaaaccctgcaggaaatcgttctgcacctggaaccgcaaaacgaactggacccggttgacctgctgtgctatgaacagctgatgcgtggccataagccgacgctgaaagagtatattctggacctgtacccagagccgacggatttgtactgttatgaacagctgagc

SEQ ID NO: 50 - protein, 360 aa, Artificial Sequence
  Synthetic Construct
GQAEPDRAHYNIVTFCCKCDSTLRLCVQSTHVDIRTLEDLLMGTLGIVCPICSQKPASGVNHQHLPARRAEPQRHTMLCMCCKCEARIELVVESSADDLRAFQQLFLNTLSFVCPWCASQQGVSHAQLPARRAEPQRHKILCVCCKCDGRIELTVESSAEDLRTLQQLFLSTLSFVCPWCATNQGQAQPATADYYIVTCCHTCNTTVRLCVNSTASDLRTIQQLLMGTVNIVCPSCAQLMHGDTPTLHEYMLDLQPETTDLYCYEQLNMHGPKATLQDIVLHLEPQNEIPVDLLCHEQLMHGPRETLQEIVLHLEPQNELDPVDLLCYEQLMRGHKPTLKEYILDLYPEPTDLYCYEQLS

SEQ ID NO: 51 - DNA, 1224 bp, Artificial Sequence
  polynucleotide for antigen E7 of HPV16, 18, 33 and 45 full
  CDS (1)..(1224)
gaagacgaaatcgacggccctgcgggccaggctgaaccagatcgtgctcactacaacatcgtaactttttgctgtaagtgcgatagcactctgcgtctgtgcgtacagtctactcacgttgatatccgcactctggaagatctgctgatgggtaccctgggtatcgtctgcccaatctgctctcaaaagcctgcttctggtgttaaccatcagcacctgccggctcgtcgcgctgaaccacagcgtcataccatgctgtgcatgtgttgcaaatgcgaggctcgcatcgaactggttgttgaatccagcgctgacgacctgcgtgcgtttcagcaactgttcctgaacacgctgtcttttgtttgtccgtggtgtgcctcccagcaggagaacgatgaagcggatggcgtgtcccacgcgcagctgccggcacgtcgtgcagaaccgcagcgccacaagattctgtgcgtttgctgtaaatgtgatggccgtatcgaactgactgtggaatcctccgcggaagatctgcgtacgctgcagcagctgttcctgtctaccctgtctttcgtgtgcccgtggtgcgccaccaatcaatcggatgaagatgaaggtctggatcgtccggatggtcaagcgcagccggcgactgcagattactatatcgtcacttgttgccacacctgcaataccaccgtgcgtctgtgtgtgaacagcacggcgagcgacctgcgcacgatccaacagttgttgatgggcaccgtgaatatcgtctgcccaagctgtgctcagttgatgcacggcgacaccccgaccctgcacgaatacatgctggacctgcagccggaaaccacggatctgtattgttatgaacagctgaacgatagcagcgaggaaatgcacggtccgaaagcaactctgcaggacattgtgctgcatctggagccacagaacgaaatcccggttgatctgctgtgccacgagcaactgagcgattccgaagaggaaaacgacgaaattgatatgcatggtccgcgcgagaccctgcaagaaatcgtcctgcacctggaaccgcaaaacgaactggaccctgtagacctgctgtgctacgaacagctgtccgaatctgaagaaatgcgtggtcacaaaccgacgctgaaagagtacatcctggacctgtacccggaacctacggatctgtactgttatgaacaactgagcgatagc

SEQ ID NO: 52 - protein, 408 aa, Artificial Sequence
  Synthetic Construct
EDEIDGPAGQAEPDRAHYNIVTFCCKCDSTLRLCVQSTHVDIRTLEDLLMGTLGIVCPICSQKPASGVNHQHLPARRAEPQRHTMLCMCCKCEARIELVVESSADDLRAFQQLFLNTLSFVCPWCASQQENDEADGVSHAQLPARRAEPQRHKILCVCCKCDGRIELTVESSAEDLRTLQQLFLSTLSFVCPWCATNQSDEDEGLDRPDGQAQPATADYYIVTCCHTCNTTVRLCVNSTASDLRTIQQLLMGTVNIVCPSCAQLMHGDTPTLHEYMLDLQPETTDLYCYEQLNDSSEEMHGPKATLQDIVLHLEPQNEIPVDLLCHEQLSDSEEENDEIDMHGPRETLQEIVLHLEPQNELDPVDLLCYEQLSESEEMRGHKPTLKEYILDLYPEPTDLYCYEQLSDS

SEQ ID NO: 53 - DNA, 1080 bp, Artificial Sequence
  polynucleotide for antigen E7 of HPV16, 18, 45 and 58 acidic-deleted
  CDS (1)..(1080)
ggtcaggcggaaccggatcgcgcgcactacaacatcgttactttttgttgcaaatgtgattccactctgcgcctgtgtgtgcaatccacccacgtagacatccgcactctggaagacctgctgatgggtaccctgggtattgtttgtccgatttgctcccagaagccggcgtctggcgttaaccaccaacacctgccggcgcgtcgcgcagagccgcagcgtcacaccatgctgtgcatgtgctgtaaatgtgaggcccgtattgaactggtcgttgagtctagcgccgacgatctgcgtgcgtttcagcagctgttcctgaacacgctgagcttcgtttgcccgtggtgtgctagccagcagggcgtgtctcacgctcagctgccggcacgtcgtgctgagcctcagcgtcacaaaatcctgtgcgtgtgctgcaaatgcgatggccgcatcgaactgaccgtggaatctagcgcagaagacctgcgtacgctgcagcaactgttcctgagcacgctgtccttcgtatgcccttggtgcgcaactaatcagggccaggcgcagccagcgacggccaattactacatcgttacctgttgctatacgtgcgatactaccgtccgtctgtgcattaacagcaccaccacggacgtgcgtaccctgcaacagctgctgatgggtacctgcacgattgtttgtccgagctgtgcacaacaaatgcacggtgacaccccgaccctgcacgaatacatgctggacctgcagccagaaaccaccgatctgtactgttacgaacagctgaacatgcatggcccaaaagctactctgcaggatatcgtcctgcatctggaaccacagaacgaaatcccggtagatctgctgtgccatgagcagctgatgcatggtccgcgtgaaaccctgcaggaaatcgttctgcacctggaaccgcaaaacgaactggacccggttgacctgctgtgctatgaacagctgatgcgcggtaataacccgaccttgcgtgagtatatcttggacctgcacccggagccgaccgatctgttctgttacgaacagctgtgc

SEQ ID NO: 54 - protein, 360 aa, Artificial Sequence
  Synthetic Construct
GQAEPDRAHYNIVTFCCKCDSTLRLCVQSTHVDIRTLEDLLMGTLGIVCPICSQKPASGVNHQHLPARRAEPQRHTMLCMCCKCEARIELVVESSADDLRAFQQLFLNTLSFVCPWCASQQGVSHAQLPARRAEPQRHKILCVCCKCDGRIELTVESSAEDLRTLQQLFLSTLSFVCPWCATNQGQAQPATANYYIVTCCYTCDTTVRLCINSTTTDVRTLQQLLMGTCTIVCPSCAQQMHGDTPTLHEYMLDLQPETTDLYCYEQLNMHGPKATLQDIVLHLEPQNEIPVDLLCHEQLMHGPRETLQEIVLHLEPQNELDPVDLLCYEQLMRGNNPTLREYILDLHPEPTDLFCYEQLC

SEQ ID NO: 55 - DNA, 1227 bp, Artificial Sequence
  polynucleotide for antigen E7 of HPV16, 18, 45 and 58  full
  CDS (1)..(1227)
gaagacgaaatcgacggccctgcgggccaggctgaaccagatcgtgctcactacaacatcgtaactttttgctgtaagtgcgatagcactctgcgtctgtgcgtacagtctactcacgttgatatccgcactctggaagatctgctgatgggtaccctgggtatcgtctgcccaatctgctctcaaaagcctgcttctggtgttaaccatcagcacctgccggctcgtcgcgctgaaccacagcgtcataccatgctgtgcatgtgttgcaaatgcgaggctcgcatcgaactggttgttgaatccagcgctgacgacctgcgtgcgtttcagcaactgttcctgaacacgctgtcttttgtttgtccgtggtgtgcctcccagcaggagaacgatgaagcggatggcgtgtcccacgcgcagctgccggcacgtcgtgcagaaccgcagcgccacaagattctgtgcgtttgctgtaaatgtgatggccgtatcgaactgactgtggaatcctccgcggaagatctgcgtacgctgcagcagctgttcctgtctaccctgtctttcgtgtgcccgtggtgcgccaccaatcaatccgacgaggacgaaatcggcctggaccgtcctgatggccaggcccagccggcaacggcgaactattacattgtgacctgctgctatacgtgcgataccacggtccgtctgtgcattaactctaccaccacggatgttcgcacgctgcagcaactgctgatgggtacctgtaccattgtttgcccgtcttgtgcccagcagatgcacggcgacaccccgaccctgcacgaatacatgctggacctgcagccggaaaccacggatctgtattgttatgaacagctgaacgatagcagcgaggaaatgcacggtccgaaagcaactctgcaggacattgtgctgcatctggagccacagaacgaaatcccggttgatctgctgtgccacgagcaactgagcgattccgaagaggaaaacgacgaaattgatatgcatggtccgcgcgagaccctgcaagaaatcgtcctgcacctggaaccgcaaaacgaactggaccctgtagacctgctgtgctacgaacagctgtccgaatctgaagaaatgcgcggtaacaatccgaccctgcgcgagtacattctggacttgcatccggaaccgacggacctgttctgttacgagcagctgtgtgacagc

SEQ ID NO: 56 - protein, 409 aa, Artificial Sequence
  Synthetic Construct
EDEIDGPAGQAEPDRAHYNIVTFCCKCDSTLRLCVQSTHVDIRTLEDLLMGTLGIVCPICSQKPASGVNHQHLPARRAEPQRHTMLCMCCKCEARIELVVESSADDLRAFQQLFLNTLSFVCPWCASQQENDEADGVSHAQLPARRAEPQRHKILCVCCKCDGRIELTVESSAEDLRTLQQLFLSTLSFVCPWCATNQSDEDEIGLDRPDGQAQPATANYYIVTCCYTCDTTVRLCINSTTTDVRTLQQLLMGTCTIVCPSCAQQMHGDTPTLHEYMLDLQPETTDLYCYEQLNDSSEEMHGPKATLQDIVLHLEPQNEIPVDLLCHEQLSDSEEENDEIDMHGPRETLQEIVLHLEPQNELDPVDLLCYEQLSESEEMRGNNPTLREYILDLHPEPTDLFCYEQLCDS

SEQ ID NO: 57 - DNA, 5670 bp, Artificial Sequence
  nucleotide encoding chimeric CyaA delta 93+ antigen HPV16, HPV18 and HPV45 acidic-deleted
  CDS (1)..(5670)
atgcagcagtcccatcaggccggttacgcaaacgcagccgatcgtgaatctggtatcccggcagcggttctggatggtattaaggcagttgccaaagagaagaacgctaccctgatgttccgtctggtcaacccacactctacttccctgatcgcggaaggtgtggcgaccaaaggcctgggtgtgcacgccaaaagcagcgactggggtctgcaggcaggttatattccggtgaacccgaatctgtctaaactgttcggtcgtgccccggaggtgatcgcacgtgcagacaacgatgtcaactcttctctggcgcatggtcacaccgcggttgatctgaccctgtccaaagaacgcctggattacctgcgtcaggcgggcctggtgacgggcatggccgacggtgttgtagcgagcaaccacgcgggttatgaacaatttgagtttcgcgttaaagagacctctgacggtcgttacgcggtgcagtaccgccgcaaaggtggcgatgactttgaagctgtcaaagtgatcggtaacgctgctggaattccgctgaccgcggatatcgacatgtttgccatcatgcctcacctgtccaactttcgcgattccgcacgcagctctgtgacgtctggtgattccgtcactgactacctggctcgtacccgtcgtgcggcctctggtcaggcggaaccggatcgcgcgcactacaacatcgttactttttgttgcaaatgtgattccactctgcgcctgtgtgtgcaatccacccacgtagacattcgcactctggaagacctgctgatgggtacccttggtattgtttgtccgatttgctcccagaagccggcgtctggcgttaaccaccaacacctgccggcgcgtcgcgcagagccgcagcgtcacaccatgctgtgcatgtgctgtaaatgtgaggcccgtatcgagctggtcgttgagtctagcgccgacgatctgcgtgcgtttcagcagctgttcctgaacacgctgagcttcgtttgcccgtggtgtgctagccagcagggcgtgtctcacgctcagctgccggcacgtcgtgctgagcctcagcgtcacaaaatcctgtgcgtgtgctgcaaatgcgatggccgcatcgaactgaccgtggaatctagcgcagaagacctgcgtacgctgcagcaactgttcctgagcacgctgtccttcgtatgcccttggtgcgcaactaatcagatgcacggtgacaccccgaccctgcacgaatacatgctggacctgcagccagaaaccaccgatctgtactgttacgaacagctgaacatgcatggcccaaaagctactctgcaggatatcgtcctgcatctggaaccacagaacgaaatcccggtagatctgctgtgccatgagcagctgatgcatggtccgcgtgaaaccctgcaggaaatcgttctgcacctggaaccgcaaaacgaactggacccggttgacctgctgtgctatgaacagctggaatcccagatgctgactcgtggccagctgaaagaatacatcggccaacagcgtggcgaaggctacgttttctacgagaatcgtgcttacggcgttgcgggcaaatccctgttcgacgatggtctgggcgctgcaccgggcgttccgagcggccgttctaaattcagcccggacgtactggaaactgtgccggcttccccgggcctgcgccgtccgtccctgggcgcagtcgaacgtcaggactccggctacgattccctggatggcgttggctcccgctccttctccctgggcgaggtttctgacatggctgcggtggaagcggcagagctggaaatgacccgtcaagtgctgcacgcgggcgcacgtcaggacgatgctgagccgggcgtgtccggtgcgtctgcacactggggtcaacgtgccctgcagggtgctcaagctgtcgcggcagcgcagcgtctggtacatgcgatcgcactgatgacccagttcggtcgcgcaggttctaccaacactcctcaggaagcagctagcctgtctgctgctgttttcggtctgggcgaagcgtcttctgcggttgcagaaaccgtgagcggtttcttccgtggttctagccgctgggcgggtggttttggtgtagcaggtggcgctatggccctgggtggcggtatcgcggctgctgtcggcgcaggtatgagcctgaccgacgatgctcctgcgggccagaaagccgcagctggcgctgaaatcgcgctgcagctgactggtggtaccgttgaactggctagctctatcgcgctggctctggcagcggcacgtggcgtgacttctggcctgcaagtcgccggtgcctctgcgggcgctgctgcgggcgctctggcagctgcactgtcccccatggaaatctacggtctggtacagcagtctcactacgcagaccagctggataaactggcgcaggagtcttctgcatacggttacgaaggcgacgcactgctggcgcagctgtatcgtgacaaaactgctgctgaaggtgctgtggcaggcgtttctgcggtactgtctaccgttggcgctgcggtttctattgcggctgccgcatccgttgtaggtgcgccggttgctgtagttacctctctgctgactggtgcactgaacggtatcctgcgtggtgttcagcagcctattatcgaaaaactggcgaatgattatgcccgtaaaatcgacgaactgggcggtccgcaggcttattttgaaaaaaacctgcaggcgcgccacgaacagctggcaaacagcgacggcctgcgcaaaatgctggcagacctgcaagctggttggaacgcgtcttctgtgatcggcgtgcagaccaccgaaattagcaaatctgcgctggaactggctgcaattactggcaacgcggataacctgaaaagcgttgatgtttttgtcgatcgcttcgttcagggcgagcgcgttgctggtcagccggttgttctggacgttgcggcaggcggcatcgacatcgctagccgcaagggcgagcgtccggctctgactttcattaccccgctggcagctccgggtgaagaacagcgtcgccgtaccaagactggtaaaagcgagttcaccaccttcgtggaaatcgtaggtaaacaggaccgctggcgtattcgcgacggtgcggcggacaccaccatcgacctggcaaaagttgtttcccaactggtagatgctaacggcgtgctgaaacattctattaaactggatgtaatcggcggtgacggcgatgacgttgtactggcgaacgcgtctcgtatccactatgacggcggcgcaggtaccaacacggtttcctacgcagcgctgggccgccaggattccatcactgttagcgccgatggcgaacgtttcaacgtgcgtaaacagctgaataacgcaaacgtctatcgtgagggtgtagctacccagaccaccgcgtacggtaagcgtaccgaaaacgttcagtatcgtcacgtggaactggcacgtgtgggtcagctggtagaggtggatacgctggaacacgtgcagcacatcatcggtggcgccggtaacgattccattactggtaacgctcacgacaacttcctggcaggtggttctggtgatgatcgtctggacggtggtgcgggtaacgatacgctggtaggcggcgaaggtcagaacaccgtaattggtggtgccggtgacgacgttttcctgcaggatctgggcgtttggagcaaccagctggatggcggtgccggtgttgacacggttaagtataacgttcaccagccgtctgaagagcgcctggaacgtatgggtgacactggtattcatgccgatctgcagaaaggcactgttgaaaaatggcctgcgctgaacctgttctctgtggaccatgttaagaacattgaaaacctgcatggctctcgcctgaacgaccgtatcgctggtgacgaccaggataacgaactgtggggtcatgacggcaatgataccattcgcggtcgtggcggcgacgatattctgcgtggcggtctgggcctggataccctgtatggtgaagatggtaacgatattttcctgcaagacgatgaaacggtatctgatgacatcgacggtggtgcaggcctggacaccgtagattacagcgctatgatccatccgggtcgtatcgtagctccgcacgagtacggcttcggtatcgaggcggacctgtctcgtgaatgggttcgtaaagcgtccgcgctgggtgtggactactacgataacgttcgtaacgtggaaaacgtgatcggtacctccatgaaagacgtgctgattggcgacgcacaggccaacactctgatgggccagggcggtgatgacacggttcgcggcggcgacggtgatgacctgctgttcggtggtgacggcaacgacatgctgtacggcgacgcgggcaacgacaccctgtacggcggtctgggtgacgacactctggaaggtggtgcaggtaacgactggttcggccaaacccaggcacgcgaacacgacgtgctgcgtggtggcgacggcgtagacaccgtggattactcccaaactggcgctcacgcgggtatcgcggccggtcgtatcggtctgggcattctggccgatctgggtgccggccgtgtcgacaaactgggtgaggctggctctagcgcctatgatactgtttccggcatcgaaaacgtggtaggcactgaactggcagatcgtatcacgggtgacgcgcaagcgaacgttctgcgtggtgctggcggtgcagacgtgctggcgggtggtgaaggcgacgacgtactgctgggcggtgacggtgacgatcagctgagcggtgatgcgggtcgtgaccgtctgtacggtgaagcaggtgacgattggttcttccaggacgctgctaacgctggcaacctgctggacggcggcgatggccgtgacactgttgacttcagcggtccgggtcgcggtctggacgcaggcgcgaaaggcgttttcctgagcctgggtaagggtttcgcatctctgatggacgaaccagaaaccagcaatgtcctgcgtaacatcgaaaacgctgtcggttccgcacgcgatgatgttctgattggcgatgctggtgccaatgttctgaacggtctggcgggtaatgatgtactgtctggtggcgctggtgatgatgtcctgctgggtgatgagggcagcgatctgctgtccggcgatgccggcaacgacgatctgttcggtggccaaggtgatgatacttacctgttcggcgttggctatggtcatgacaccatctatgagtctggtggcggccacgatacgattcgtattaatgcaggtgctgaccaactgtggtttgcacgtcagggtaacgatctggaaattcgcatcctgggtactgatgacgctctgaccgtacacgactggtaccgcgatgcggatcaccgcgtagaaatcatccatgcggctaaccaagctgtagaccaggctggtattgaaaaactggtagaagcgatggcacagtatccggacccaggtgcggctgctgcagcacctccagcggctcgtgtgccggataccctgatgcagagcctggccgtcaattggcgttaa

SEQ ID NO: 58 - protein, 1889 aa, Artificial Sequence
  Synthetic Construct
MQQSHQAGYANAADRESGIPAAVLDGIKAVAKEKNATLMFRLVNPHSTSLIAEGVATKGLGVHAKSSDWGLQAGYIPVNPNLSKLFGRAPEVIARADNDVNSSLAHGHTAVDLTLSKERLDYLRQAGLVTGMADGVVASNHAGYEQFEFRVKETSDGRYAVQYRRKGGDDFEAVKVIGNAAGIPLTADIDMFAIMPHLSNFRDSARSSVTSGDSVTDYLARTRRAASGQAEPDRAHYNIVTFCCKCDSTLRLCVQSTHVDIRTLEDLLMGTLGIVCPICSQKPASGVNHQHLPARRAEPQRHTMLCMCCKCEARIELVVESSADDLRAFQQLFLNTLSFVCPWCASQQGVSHAQLPARRAEPQRHKILCVCCKCDGRIELTVESSAEDLRTLQQLFLSTLSFVCPWCATNQMHGDTPTLHEYMLDLQPETTDLYCYEQLNMHGPKATLQDIVLHLEPQNEIPVDLLCHEQLMHGPRETLQEIVLHLEPQNELDPVDLLCYEQLESQMLTRGQLKEYIGQQRGEGYVFYENRAYGVAGKSLFDDGLGAAPGVPSGRSKFSPDVLETVPASPGLRRPSLGAVERQDSGYDSLDGVGSRSFSLGEVSDMAAVEAAELEMTRQVLHAGARQDDAEPGVSGASAHWGQRALQGAQAVAAAQRLVHAIALMTQFGRAGSTNTPQEAASLSAAVFGLGEASSAVAETVSGFFRGSSRWAGGFGVAGGAMALGGGIAAAVGAGMSLTDDAPAGQKAAAGAEIALQLTGGTVELASSIALALAAARGVTSGLQVAGASAGAAAGALAAALSPMEIYGLVQQSHYADQLDKLAQESSAYGYEGDALLAQLYRDKTAAEGAVAGVSAVLSTVGAAVSIAAAASVVGAPVAVVTSLLTGALNGILRGVQQPIIEKLANDYARKIDELGGPQAYFEKNLQARHEQLANSDGLRKMLADLQAGWNASSVIGVQTTEISKSALELAAITGNADNLKSVDVFVDRFVQGERVAGQPVVLDVAAGGIDIASRKGERPALTFITPLAAPGEEQRRRTKTGKSEFTTFVEIVGKQDRWRIRDGAADTTIDLAKVVSQLVDANGVLKHSIKLDVIGGDGDDVVLANASRIHYDGGAGTNTVSYAALGRQDSITVSADGERFNVRKQLNNANVYREGVATQTTAYGKRTENVQYRHVELARVGQLVEVDTLEHVQHIIGGAGNDSITGNAHDNFLAGGSGDDRLDGGAGNDTLVGGEGQNTVIGGAGDDVFLQDLGVWSNQLDGGAGVDTVKYNVHQPSEERLERMGDTGIHADLQKGTVEKWPALNLFSVDHVKNIENLHGSRLNDRIAGDDQDNELWGHDGNDTIRGRGGDDILRGGLGLDTLYGEDGNDIFLQDDETVSDDIDGGAGLDTVDYSAMIHPGRIVAPHEYGFGIEADLSREWVRKASALGVDYYDNVRNVENVIGTSMKDVLIGDAQANTLMGQGGDDTVRGGDGDDLLFGGDGNDMLYGDAGNDTLYGGLGDDTLEGGAGNDWFGQTQAREHDVLRGGDGVDTVDYSQTGAHAGIAAGRIGLGILADLGAGRVDKLGEAGSSAYDTVSGIENVVGTELADRITGDAQANVLRGAGGADVLAGGEGDDVLLGGDGDDQLSGDAGRDRLYGEAGDDWFFQDAANAGNLLDGGDGRDTVDFSGPGRGLDAGAKGVFLSLGKGFASLMDEPETSNVLRNIENAVGSARDDVLIGDAGANVLNGLAGNDVLSGGAGDDVLLGDEGSDLLSGDAGNDDLFGGQGDDTYLFGVGYGHDTIYESGGGHDTIRINAGADQLWFARQGNDLEIRILGTDDALTVHDWYRDADHRVEIIHAANQAVDQAGIEKLVEAMAQYPDPGAAAAAPPAARVPDTLMQSLAVNWR

SEQ ID NO: 59 - DNA, 12000 bp, Artificial Sequence
  plasmid comprising SEQ ID NO:57
atcgagatctgtatggctgtgcaggtcgtaaatcactgcataattcgtgtcgctcaaggcgcactcccgttctggataatgttttttgcgccgacatcataacggttctggcaaatattctgaaatgagctgttgacaattaatcatcggctcgtataatgtgtggaattgtgagcggataacaattataattttgtttaactttaagaaggagatatacatatgcagcagtcccatcaggccggttacgcaaacgcagccgatcgtgaatctggtatcccggcagcggttctggatggtattaaggcagttgccaaagagaagaacgctaccctgatgttccgtctggtcaacccacactctacttccctgatcgcggaaggtgtggcgaccaaaggcctgggtgtgcacgccaaaagcagcgactggggtctgcaggcaggttatattccggtgaacccgaatctgtctaaactgttcggtcgtgccccggaggtgatcgcacgtgcagacaacgatgtcaactcttctctggcgcatggtcacaccgcggttgatctgaccctgtccaaagaacgcctggattacctgcgtcaggcgggcctggtgacgggcatggccgacggtgttgtagcgagcaaccacgcgggttatgaacaatttgagtttcgcgttaaagagacctctgacggtcgttacgcggtgcagtaccgccgcaaaggtggcgatgactttgaagctgtcaaagtgatcggtaacgctgctggaattccgctgaccgcggatatcgacatgtttgccatcatgcctcacctgtccaactttcgcgattccgcacgcagctctgtgacgtctggtgattccgtcactgactacctggctcgtacccgtcgtgcggcctctggtcaggcggaaccggatcgcgcgcactacaacatcgttactttttgttgcaaatgtgattccactctgcgcctgtgtgtgcaatccacccacgtagacattcgcactctggaagacctgctgatgggtacccttggtattgtttgtccgatttgctcccagaagccggcgtctggcgttaaccaccaacacctgccggcgcgtcgcgcagagccgcagcgtcacaccatgctgtgcatgtgctgtaaatgtgaggcccgtatcgagctggtcgttgagtctagcgccgacgatctgcgtgcgtttcagcagctgttcctgaacacgctgagcttcgtttgcccgtggtgtgctagccagcagggcgtgtctcacgctcagctgccggcacgtcgtgctgagcctcagcgtcacaaaatcctgtgcgtgtgctgcaaatgcgatggccgcatcgaactgaccgtggaatctagcgcagaagacctgcgtacgctgcagcaactgttcctgagcacgctgtccttcgtatgcccttggtgcgcaactaatcagatgcacggtgacaccccgaccctgcacgaatacatgctggacctgcagccagaaaccaccgatctgtactgttacgaacagctgaacatgcatggcccaaaagctactctgcaggatatcgtcctgcatctggaaccacagaacgaaatcccggtagatctgctgtgccatgagcagctgatgcatggtccgcgtgaaaccctgcaggaaatcgttctgcacctggaaccgcaaaacgaactggacccggttgacctgctgtgctatgaacagctggaatcccagatgctgactcgtggccagctgaaagaatacatcggccaacagcgtggcgaaggctacgttttctacgagaatcgtgcttacggcgttgcgggcaaatccctgttcgacgatggtctgggcgctgcaccgggcgttccgagcggccgttctaaattcagcccggacgtactggaaactgtgccggcttccccgggcctgcgccgtccgtccctgggcgcagtcgaacgtcaggactccggctacgattccctggatggcgttggctcccgctccttctccctgggcgaggtttctgacatggctgcggtggaagcggcagagctggaaatgacccgtcaagtgctgcacgcgggcgcacgtcaggacgatgctgagccgggcgtgtccggtgcgtctgcacactggggtcaacgtgccctgcagggtgctcaagctgtcgcggcagcgcagcgtctggtacatgcgatcgcactgatgacccagttcggtcgcgcaggttctaccaacactcctcaggaagcagctagcctgtctgctgctgttttcggtctgggcgaagcgtcttctgcggttgcagaaaccgtgagcggtttcttccgtggttctagccgctgggcgggtggttttggtgtagcaggtggcgctatggccctgggtggcggtatcgcggctgctgtcggcgcaggtatgagcctgaccgacgatgctcctgcgggccagaaagccgcagctggcgctgaaatcgcgctgcagctgactggtggtaccgttgaactggctagctctatcgcgctggctctggcagcggcacgtggcgtgacttctggcctgcaagtcgccggtgcctctgcgggcgctgctgcgggcgctctggcagctgcactgtcccccatggaaatctacggtctggtacagcagtctcactacgcagaccagctggataaactggcgcaggagtcttctgcatacggttacgaaggcgacgcactgctggcgcagctgtatcgtgacaaaactgctgctgaaggtgctgtggcaggcgtttctgcggtactgtctaccgttggcgctgcggtttctattgcggctgccgcatccgttgtaggtgcgccggttgctgtagttacctctctgctgactggtgcactgaacggtatcctgcgtggtgttcagcagcctattatcgaaaaactggcgaatgattatgcccgtaaaatcgacgaactgggcggtccgcaggcttattttgaaaaaaacctgcaggcgcgccacgaacagctggcaaacagcgacggcctgcgcaaaatgctggcagacctgcaagctggttggaacgcgtcttctgtgatcggcgtgcagaccaccgaaattagcaaatctgcgctggaactggctgcaattactggcaacgcggataacctgaaaagcgttgatgtttttgtcgatcgcttcgttcagggcgagcgcgttgctggtcagccggttgttctggacgttgcggcaggcggcatcgacatcgctagccgcaagggcgagcgtccggctctgactttcattaccccgctggcagctccgggtgaagaacagcgtcgccgtaccaagactggtaaaagcgagttcaccaccttcgtggaaatcgtaggtaaacaggaccgctggcgtattcgcgacggtgcggcggacaccaccatcgacctggcaaaagttgtttcccaactggtagatgctaacggcgtgctgaaacattctattaaactggatgtaatcggcggtgacggcgatgacgttgtactggcgaacgcgtctcgtatccactatgacggcggcgcaggtaccaacacggtttcctacgcagcgctgggccgccaggattccatcactgttagcgccgatggcgaacgtttcaacgtgcgtaaacagctgaataacgcaaacgtctatcgtgagggtgtagctacccagaccaccgcgtacggtaagcgtaccgaaaacgttcagtatcgtcacgtggaactggcacgtgtgggtcagctggtagaggtggatacgctggaacacgtgcagcacatcatcggtggcgccggtaacgattccattactggtaacgctcacgacaacttcctggcaggtggttctggtgatgatcgtctggacggtggtgcgggtaacgatacgctggtaggcggcgaaggtcagaacaccgtaattggtggtgccggtgacgacgttttcctgcaggatctgggcgtttggagcaaccagctggatggcggtgccggtgttgacacggttaagtataacgttcaccagccgtctgaagagcgcctggaacgtatgggtgacactggtattcatgccgatctgcagaaaggcactgttgaaaaatggcctgcgctgaacctgttctctgtggaccatgttaagaacattgaaaacctgcatggctctcgcctgaacgaccgtatcgctggtgacgaccaggataacgaactgtggggtcatgacggcaatgataccattcgcggtcgtggcggcgacgatattctgcgtggcggtctgggcctggataccctgtatggtgaagatggtaacgatattttcctgcaagacgatgaaacggtatctgatgacatcgacggtggtgcaggcctggacaccgtagattacagcgctatgatccatccgggtcgtatcgtagctccgcacgagtacggcttcggtatcgaggcggacctgtctcgtgaatgggttcgtaaagcgtccgcgctgggtgtggactactacgataacgttcgtaacgtggaaaacgtgatcggtacctccatgaaagacgtgctgattggcgacgcacaggccaacactctgatgggccagggcggtgatgacacggttcgcggcggcgacggtgatgacctgctgttcggtggtgacggcaacgacatgctgtacggcgacgcgggcaacgacaccctgtacggcggtctgggtgacgacactctggaaggtggtgcaggtaacgactggttcggccaaacccaggcacgcgaacacgacgtgctgcgtggtggcgacggcgtagacaccgtggattactcccaaactggcgctcacgcgggtatcgcggccggtcgtatcggtctgggcattctggccgatctgggtgccggccgtgtcgacaaactgggtgaggctggctctagcgcctatgatactgtttccggcatcgaaaacgtggtaggcactgaactggcagatcgtatcacgggtgacgcgcaagcgaacgttctgcgtggtgctggcggtgcagacgtgctggcgggtggtgaaggcgacgacgtactgctgggcggtgacggtgacgatcagctgagcggtgatgcgggtcgtgaccgtctgtacggtgaagcaggtgacgattggttcttccaggacgctgctaacgctggcaacctgctggacggcggcgatggccgtgacactgttgacttcagcggtccgggtcgcggtctggacgcaggcgcgaaaggcgttttcctgagcctgggtaagggtttcgcatctctgatggacgaaccagaaaccagcaatgtcctgcgtaacatcgaaaacgctgtcggttccgcacgcgatgatgttctgattggcgatgctggtgccaatgttctgaacggtctggcgggtaatgatgtactgtctggtggcgctggtgatgatgtcctgctgggtgatgagggcagcgatctgctgtccggcgatgccggcaacgacgatctgttcggtggccaaggtgatgatacttacctgttcggcgttggctatggtcatgacaccatctatgagtctggtggcggccacgatacgattcgtattaatgcaggtgctgaccaactgtggtttgcacgtcagggtaacgatctggaaattcgcatcctgggtactgatgacgctctgaccgtacacgactggtaccgcgatgcggatcaccgcgtagaaatcatccatgcggctaaccaagctgtagaccaggctggtattgaaaaactggtagaagcgatggcacagtatccggacccaggtgcggctgctgcagcacctccagcggctcgtgtgccggataccctgatgcagagcctggccgtcaattggcgttaatggatccaggcctctttagaaggagatataccatgctgccgtctgcacaggcgccgtctctgctgaatccaactgatgacttcgctgcgctgggtaacatcgcgtggctgtggatgaacagcccgatgcaccgtgactggccggttcacctgctggcacgtaacacgctggcgccgatccagctgggtcaatacatcctgctgcgttgtaacgacgtgcctgtggcgtattgctcctgggcactgatggatgcggataccgagctgtcctacgttatggccccatctagcctgggcggtaacgcttggaactgcggcgatcgtctgtggatcattgattggattgctccgtttagccgtgacgacaaccgtgctctgcgtcgcgcgctggccgaacgtcatccggattctgttggccgttccctgcgcgtacgtcgcggtggcgacaccgctcgcgtcaaagaataccgtggtcgtgctctggacgcagcggcggcccgcgctcagctggaccgctaccacgcagaactgattgccggtctgcgtgcatccaatggcggttatgctccgcgtggccgtggcaccgcataatctagaattctttaattaaagatccggctgctaacaaagcccgaaaggaagctgagttggctgctgccaccgctgagcaatccaggcatcaaataaaacgaaaggctcagtcgaaagactgggcctttcgttttatctgttgtttgtcggtgaacgctctcctgagtaggacaaatccgccgggagcggatttgaacgttgcgaagcaacggcccggagggtggcgggcaggacgcccgccataaactgccaggcatcaaattaagcagaaggccatcctgacggatggcctttttgctagcagcacgccatagtgactggcgatgctgtcggaatggacgatatcccgcaagaggcccggcagtaccggcataaccaagcctatgcctacagcatccagggtgacggtgccgaggatgacgatgagcgcattgttagatttcatacacggtgcctgactgcgttagcaatttaactgtgataaactaccgcattaaagcttatcgatgataagctgtcaaacatgagaattcttagaaaaactcatcgagcatcaaatgaaactgcaatttattcatatcaggattatcaataccatatttttgaaaaagccgtttctgtaatgaaggagaaaactcaccgaggcagttccataggatggcaagatcctggtatcggtctgcgattccgactcgtccaacatcaatacaacctattaatttcccctcgtcaaaaataaggttatcaagtgagaaatcaccatgagtgacgactgaatccggtgagaatggcaaaagcttatgcatttctttccagacttgttcaacaggccagccattacgctcgtcatcaaaatcactcgcatcaaccaaaccgttattcattcgtgattgcgcctgagcgagacgaaatacgcgatcgctgttaaaaggacaattacaaacaggaatcgaatgcaaccggcgcaggaacactgccagcgcatcaacaatattttcacctgaatcaggatattcttctaatacctggaatgctgttttcccggggatcgcagtggtgagtaaccatgcatcatcaggagtacggataaaatgcttgatggtcggaagaggcataaattccgtcagccagtttagtctgaccatctcatctgtaacatcattggcaacgctacctttgccatgtttcagaaacaactctggcgcatcgggcttcccatacaatcgatagattgtcgcacctgattgcccgacattatcgcgagcccatttatacccatataaatcagcatccatgttggaatttaatcgcggcctcgagcaagacgtttcccgttgaatatggctcataacaccccttgtattactgtttatgtaagcagacagttttattgttcatgaccaaaatcccttaacgtgagttttcgttccactgagcgtcagaccccgtagaaaagatcaaaggatcttcttgagatcctttttttctgcgcgtaatctgctgcttgcaaacaaaaaaaccaccgctaccagcggtggtttgtttgccggatcaagagctaccaactctttttccgaaggtaactggcttcagcagagcgcagataccaaatactgtccttctagtgtagccgtagttaggccaccacttcaagaactctgtagcaccgcctacatacctcgctctgctaatcctgttaccagtggctgctgccagtggcgataagtcgtgtcttaccgggttggactcaagacgatagttaccggataaggcgcagcggtcgggctgaacggggggttcgtgcacacagcccagcttggagcgaacgacctacaccgaactgagatacctacagcgtgagctatgagaaagcgccacgcttcccgaagggagaaaggcggacaggtatccggtaagcggcagggtcggaacaggagagcgcacgagggagcttccagggggaaacgcctggtatctttatagtcctgtcgggtttcgccacctctgacttgagcgtcgatttttgtgatgctcgtcaggggggcggagcctatggaaaaacgccagcaacgcggcctttttacggttcctggccttttgctggccttttgctcacatgttctttcctgcgttatcccctgattctgtggataaccgtattaccgcctttgagtgagctgataccgctcgccgcagccgaacgaccgagcgcagcgagtcagtgagcgaggaagcggaagagcgcctgatgcggtattttctccttacgcatctgtgcggtatttcacaccgcaatggtgcactctcagtacaatctgctctgatgccgcatagttaagccagtatacactccgctatcgctacgtgactgggtcatggctgcgccccgacacccgccaacacccgctgacgcgccctgacgggcttgtctgctcccggcatccgcttacagacaagctgtgaccgtctccgggagctgcatgtgtcagaggttttcaccgtcatcaccgaaacgcgcgaggcagctgcggtaaagctcatcagcgtggtcgtgaagcgattcacagatgtctgcctgttcatccgcgtccagctcgttgagtttctccagaagcgttaatgtctggcttctgataaagcgggccatgttaagggcggttttttcctgtttggtcactgatgcctccgtgtaagggggatttctgttcatgggggtaatgataccgatgaaacgagagaggatgctcacgatacgggttactgatgatgaacatgcccggttactggaacgttgtgagggtaaacaactggcggtatggatgcggcgggaccagagaaaaatcactcagggtcaatgccagcgcttcgttaatacagatgtaggtgttccacagggtagccagcagcatcctgcgatgcagatccggaacataatggtgcagggcgctgacttccgcgtttccagactttacgaaacacggaaaccgaagaccattcatgttgttgctcaggtcgcagacgttttgcagcagcagtcgcttcacgttcgctcgcgtatcggtgattcattctgctaaccagtaaggcaaccccgccagcctagccgggtcctcaacgacaggagcacgatcatgcgcacccgtggccaggacccaacgctgcccgagatgcgccgcgtgcggctgctggagatggcggacgcgatggatatgttctgccaagggttggtttgcgcattcacagttctccgcaagaattgattggctccaattcttggagtggtgaatccgttagcgaggtgccgccggcttccattcaggtcgaggtggcccggctccatgcaccgcgacgcaacgcggggaggcagacaaggtatagggcggcgcctacaatccatgccaacccgttccatgtgctcgccgaggcggcataaatcgccgtgacgatcagcggtccaatgatcgaagttaggctggtaagagccgcgagcgatccttgaagctgtccctgatggtcgtcatctacctgcctggacagcatggcctgcaacgcgggcatcccgatgccgccggaagcgagaagaatcataatggggaaggccatccagcctcgcgtcgcgaacgccagcaagacgtagcccagcgcgtcggccgccatgccggcgataatggcctgcttctcgccgaaacgtttggtggcgggaccagtgacgaaggcttgagcgagggcgtgcaagattccgaataccgcaagcgacaggccgatcatcgtcgcgctccagcgaaagcggtcctcgccgaaaatgacccagagcgctgccggcacctgtcctacgagttgcatgataaagaagacagtcataagtgcggcgacgatagtcatgccccgcgcccaccggaaggagctgactgggttgaaggctctcaagggcatcggtcgactcatagctgtttcctgtgtgaaattgttatccgctcacaattccacacaacatacgagccggaagcataaagtgtaaagcctggggtgcctaatgagtgagctaacttacattaattgcgttgcgctcactgcccgctttccagtcgggaaacctgtcgtgccagctgcattaatgaatcggccaacgcgcggggagaggcggtttgcgtattgggcgctagcgtggtttttcttttcaccagtgagacgggcaacagctgattgcccttcaccgcctggccctgagagagttgcagcaagcggtccacgctggtttgccccagcaggcgaaaatcctgtttgatggtggttaacggcgggatataacatgagctgtcttcggtatcgtcgtatcccactaccgagatatccgcaccaacgcgcagcccggactcggtaatggcgcgcattgcgcccagcgccatctgatcgttggcaaccagcatcgcagtgggaacgatgccctcattcagcatttgcatggtttgttgaaaaccggacatggcactccagtcgccttcccgttccgctatcggctgaatttgattgcgagtgagatatttatgccagccagccagacgcagacgcgccgagacagaacttaatgggcccgctaacagcgcgatttgctggtgacccaatgcgaccagatgctccacgcccagtcgcgtaccgtcttcatgggagaaaataatactgttgatgggtgtctggtcagagacatcaagaaataacgccggaacattagtgcaggcagcttccacagcaatggcatcctggtcatccagcggatagttaatgatcagcccactgacgcgttgcgcgagaagattgtgcaccgccgctttacaggcttcgacgccgcttcgttctaccatcgacaccaccacgctggcacccagttgatcggcgcgagatttaatcgccgcgacaatttgcgacggcgcgtgcagggccagactggaggtggcaacgccaatcagcaacgactgtttgcccgccagttgttgtgccacgcggttgggaatgtaattcagctccgccatcgccgcttccactttttcccgcgttttcgcagaaacgtggctggcctggttcaccacgcgggaaacggtctgataagagacaccggcatactctgcgacatcgtataacgttactggtttcacattcaccaccctgaattgactctcttccgggcgctatcatgccataccgcgaaaggttttgcgccattcgatggtgtcggaatttatgcggtgtgaaataccgcacagatgcgtaaggagaaaataccgcatcaggcgctcttccgcttcctcgctcactgactcgctgccaccccgtggcatgcaaggagatggcgcccaacagtcccccggccacggggcctgccaccatacccacgccgaaacaagcgctcatgagcccgaagtggcgagcccgatcttccccatcggtgatgtcggcgatataggcgccagcaaccgcacctgtggcgccggtgatgccggccacgatgcgtccggcgtagagg

SEQ ID NO: 60 - DNA, 5340 bp, Artificial Sequence
  nucleotide encoding chimeric CyaA delta 203+ antigen HPV16, HVP18 and HPV45 acidic-deleted
  CDS (1)..(5340)
atgcagcagtcccatcaggccggttacgcaaacgcagccgatcgtgaatctggtatcccggcagcggttctggatggtattaaggcagttgccaaagagaagaacgctaccctgatgttccgtctggtcaacccacactctacttccctgatcgcggaaggtgtggcgaccaaaggcctgggtgtgcacgccaaaagcagcgactggggtctgcaggcaggttatattccggtgaacccgaatctgtctaaactgttcggtcgtgccccggaggtgatcgcacgtgcagacaacgatgtcaactcttctctggcgcatggtcacaccgcggttgatctgaccctgtccaaagaacgcctggattacctgcgtcaggcgggcctggtgacgggcatggccgacggtgttgtagcgagcaaccacgcgggttatgaacaatttgagtttcgcgttaaagagacctctgacggtcgttacgcggtgcagtaccgccgcaaaggtggcgatgactttgaagctgtcaaagtgatcggtaacgctgctggaattggtcaggcggaaccggatcgcgcgcactacaacatcgttactttttgttgcaaatgtgattccactctgcgcctgtgtgtgcaatccacccacgtagacattcgcactctggaagacctgctgatgggtacccttggtattgtttgtccgatttgctcccagaagccggcgtctggcgttaaccaccaacacctgccggcgcgtcgcgcagagccgcagcgtcacaccatgctgtgcatgtgctgtaaatgtgaggcccgtatcgagctggtcgttgagtctagcgccgacgatctgcgtgcgtttcagcagctgttcctgaacacgctgagcttcgtttgcccgtggtgtgctagccagcagggcgtgtctcacgctcagctgccggcacgtcgtgctgagcctcagcgtcacaaaatcctgtgcgtgtgctgcaaatgcgatggccgcatcgaactgaccgtggaatctagcgcagaagacctgcgtacgctgcagcaactgttcctgagcacgctgtccttcgtatgcccttggtgcgcaactaatcagatgcacggtgacaccccgaccctgcacgaatacatgctggacctgcagccagaaaccaccgatctgtactgttacgaacagctgaacatgcatggcccaaaagctactctgcaggatatcgtcctgcatctggaaccacagaacgaaatcccggtagatctgctgtgccatgagcagctgatgcatggtccgcgtgaaaccctgcaggaaatcgttctgcacctggaaccgcaaaacgaactggacccggttgacctgctgtgctatgaacagctgccgggcctgcgccgtccgtccctgggcgcagtcgaacgtcaggactccggctacgattccctggatggcgttggctcccgctccttctccctgggcgaggtttctgacatggctgcggtggaagcggcagagctggaaatgacccgtcaagtgctgcacgcgggcgcacgtcaggacgatgctgagccgggcgtgtccggtgcgtctgcacactggggtcaacgtgccctgcagggtgctcaagctgtcgcggcagcgcagcgtctggtacatgcgatcgcactgatgacccagttcggtcgcgcaggttctaccaacactcctcaggaagcagctagcctgtctgctgctgttttcggtctgggcgaagcgtcttctgcggttgcagaaaccgtgagcggtttcttccgtggttctagccgctgggcgggtggttttggtgtagcaggtggcgctatggccctgggtggcggtatcgcggctgctgtcggcgcaggtatgagcctgaccgacgatgctcctgcgggccagaaagccgcagctggcgctgaaatcgcgctgcagctgactggtggtaccgttgaactggctagctctatcgcgctggctctggcagcggcacgtggcgtgacttctggcctgcaagtcgccggtgcctctgcgggcgctgctgcgggcgctctggcagctgcactgtcccccatggaaatctacggtctggtacagcagtctcactacgcagaccagctggataaactggcgcaggagtcttctgcatacggttacgaaggcgacgcactgctggcgcagctgtatcgtgacaaaactgctgctgaaggtgctgtggcaggcgtttctgcggtactgtctaccgttggcgctgcggtttctattgcggctgccgcatccgttgtaggtgcgccggttgctgtagttacctctctgctgactggtgcactgaacggtatcctgcgtggtgttcagcagcctattatcgaaaaactggcgaatgattatgcccgtaaaatcgacgaactgggcggtccgcaggcttattttgaaaaaaacctgcaggcgcgccacgaacagctggcaaacagcgacggcctgcgcaaaatgctggcagacctgcaagctggttggaacgcgtcttctgtgatcggcgtgcagaccaccgaaattagcaaatctgcgctggaactggctgcaattactggcaacgcggataacctgaaaagcgttgatgtttttgtcgatcgcttcgttcagggcgagcgcgttgctggtcagccggttgttctggacgttgcggcaggcggcatcgacatcgctagccgcaagggcgagcgtccggctctgactttcattaccccgctggcagctccgggtgaagaacagcgtcgccgtaccaagactggtaaaagcgagttcaccaccttcgtggaaatcgtaggtaaacaggaccgctggcgtattcgcgacggtgcggcggacaccaccatcgacctggcaaaagttgtttcccaactggtagatgctaacggcgtgctgaaacattctattaaactggatgtaatcggcggtgacggcgatgacgttgtactggcgaacgcgtctcgtatccactatgacggcggcgcaggtaccaacacggtttcctacgcagcgctgggccgccaggattccatcactgttagcgccgatggcgaacgtttcaacgtgcgtaaacagctgaataacgcaaacgtctatcgtgagggtgtagctacccagaccaccgcgtacggtaagcgtaccgaaaacgttcagtatcgtcacgtggaactggcacgtgtgggtcagctggtagaggtggatacgctggaacacgtgcagcacatcatcggtggcgccggtaacgattccattactggtaacgctcacgacaacttcctggcaggtggttctggtgatgatcgtctggacggtggtgcgggtaacgatacgctggtaggcggcgaaggtcagaacaccgtaattggtggtgccggtgacgacgttttcctgcaggatctgggcgtttggagcaaccagctggatggcggtgccggtgttgacacggttaagtataacgttcaccagccgtctgaagagcgcctggaacgtatgggtgacactggtattcatgccgatctgcagaaaggcactgttgaaaaatggcctgcgctgaacctgttctctgtggaccatgttaagaacattgaaaacctgcatggctctcgcctgaacgaccgtatcgctggtgacgaccaggataacgaactgtggggtcatgacggcaatgataccattcgcggtcgtggcggcgacgatattctgcgtggcggtctgggcctggataccctgtatggtgaagatggtaacgatattttcctgcaagacgatgaaacggtatctgatgacatcgacggtggtgcaggcctggacaccgtagattacagcgctatgatccatccgggtcgtatcgtagctccgcacgagtacggcttcggtatcgaggcggacctgtctcgtgaatgggttcgtaaagcgtccgcgctgggtgtggactactacgataacgttcgtaacgtggaaaacgtgatcggtacctccatgaaagacgtgctgattggcgacgcacaggccaacactctgatgggccagggcggtgatgacacggttcgcggcggcgacggtgatgacctgctgttcggtggtgacggcaacgacatgctgtacggcgacgcgggcaacgacaccctgtacggcggtctgggtgacgacactctggaaggtggtgcaggtaacgactggttcggccaaacccaggcacgcgaacacgacgtgctgcgtggtggcgacggcgtagacaccgtggattactcccaaactggcgctcacgcgggtatcgcggccggtcgtatcggtctgggcattctggccgatctgggtgccggccgtgtcgacaaactgggtgaggctggctctagcgcctatgatactgtttccggcatcgaaaacgtggtaggcactgaactggcagatcgtatcacgggtgacgcgcaagcgaacgttctgcgtggtgctggcggtgcagacgtgctggcgggtggtgaaggcgacgacgtactgctgggcggtgacggtgacgatcagctgagcggtgatgcgggtcgtgaccgtctgtacggtgaagcaggtgacgattggttcttccaggacgctgctaacgctggcaacctgctggacggcggcgatggccgtgacactgttgacttcagcggtccgggtcgcggtctggacgcaggcgcgaaaggcgttttcctgagcctgggtaagggtttcgcatctctgatggacgaaccagaaaccagcaatgtcctgcgtaacatcgaaaacgctgtcggttccgcacgcgatgatgttctgattggcgatgctggtgccaatgttctgaacggtctggcgggtaatgatgtactgtctggtggcgctggtgatgatgtcctgctgggtgatgagggcagcgatctgctgtccggcgatgccggcaacgacgatctgttcggtggccaaggtgatgatacttacctgttcggcgttggctatggtcatgacaccatctatgagtctggtggcggccacgatacgattcgtattaatgcaggtgctgaccaactgtggtttgcacgtcagggtaacgatctggaaattcgcatcctgggtactgatgacgctctgaccgtacacgactggtaccgcgatgcggatcaccgcgtagaaatcatccatgcggctaaccaagctgtagaccaggctggtattgaaaaactggtagaagcgatggcacagtatccggacccaggtgcggctgctgcagcacctccagcggctcgtgtgccggataccctgatgcagagcctggccgtcaattggcgttaa

SEQ ID NO: 61 - protein, 1779 aa, Artificial Sequence
  Synthetic Construct
MQQSHQAGYANAADRESGIPAAVLDGIKAVAKEKNATLMFRLVNPHSTSLIAEGVATKGLGVHAKSSDWGLQAGYIPVNPNLSKLFGRAPEVIARADNDVNSSLAHGHTAVDLTLSKERLDYLRQAGLVTGMADGVVASNHAGYEQFEFRVKETSDGRYAVQYRRKGGDDFEAVKVIGNAAGIGQAEPDRAHYNIVTFCCKCDSTLRLCVQSTHVDIRTLEDLLMGTLGIVCPICSQKPASGVNHQHLPARRAEPQRHTMLCMCCKCEARIELVVESSADDLRAFQQLFLNTLSFVCPWCASQQGVSHAQLPARRAEPQRHKILCVCCKCDGRIELTVESSAEDLRTLQQLFLSTLSFVCPWCATNQMHGDTPTLHEYMLDLQPETTDLYCYEQLNMHGPKATLQDIVLHLEPQNEIPVDLLCHEQLMHGPRETLQEIVLHLEPQNELDPVDLLCYEQLPGLRRPSLGAVERQDSGYDSLDGVGSRSFSLGEVSDMAAVEAAELEMTRQVLHAGARQDDAEPGVSGASAHWGQRALQGAQAVAAAQRLVHAIALMTQFGRAGSTNTPQEAASLSAAVFGLGEASSAVAETVSGFFRGSSRWAGGFGVAGGAMALGGGIAAAVGAGMSLTDDAPAGQKAAAGAEIALQLTGGTVELASSIALALAAARGVTSGLQVAGASAGAAAGALAAALSPMEIYGLVQQSHYADQLDKLAQESSAYGYEGDALLAQLYRDKTAAEGAVAGVSAVLSTVGAAVSIAAAASVVGAPVAVVTSLLTGALNGILRGVQQPIIEKLANDYARKIDELGGPQAYFEKNLQARHEQLANSDGLRKMLADLQAGWNASSVIGVQTTEISKSALELAAITGNADNLKSVDVFVDRFVQGERVAGQPVVLDVAAGGIDIASRKGERPALTFITPLAAPGEEQRRRTKTGKSEFTTFVEIVGKQDRWRIRDGAADTTIDLAKVVSQLVDANGVLKHSIKLDVIGGDGDDVVLANASRIHYDGGAGTNTVSYAALGRQDSITVSADGERFNVRKQLNNANVYREGVATQTTAYGKRTENVQYRHVELARVGQLVEVDTLEHVQHIIGGAGNDSITGNAHDNFLAGGSGDDRLDGGAGNDTLVGGEGQNTVIGGAGDDVFLQDLGVWSNQLDGGAGVDTVKYNVHQPSEERLERMGDTGIHADLQKGTVEKWPALNLFSVDHVKNIENLHGSRLNDRIAGDDQDNELWGHDGNDTIRGRGGDDILRGGLGLDTLYGEDGNDIFLQDDETVSDDIDGGAGLDTVDYSAMIHPGRIVAPHEYGFGIEADLSREWVRKASALGVDYYDNVRNVENVIGTSMKDVLIGDAQANTLMGQGGDDTVRGGDGDDLLFGGDGNDMLYGDAGNDTLYGGLGDDTLEGGAGNDWFGQTQAREHDVLRGGDGVDTVDYSQTGAHAGIAAGRIGLGILADLGAGRVDKLGEAGSSAYDTVSGIENVVGTELADRITGDAQANVLRGAGGADVLAGGEGDDVLLGGDGDDQLSGDAGRDRLYGEAGDDWFFQDAANAGNLLDGGDGRDTVDFSGPGRGLDAGAKGVFLSLGKGFASLMDEPETSNVLRNIENAVGSARDDVLIGDAGANVLNGLAGNDVLSGGAGDDVLLGDEGSDLLSGDAGNDDLFGGQGDDTYLFGVGYGHDTIYESGGGHDTIRINAGADQLWFARQGNDLEIRILGTDDALTVHDWYRDADHRVEIIHAANQAVDQAGIEKLVEAMAQYPDPGAAAAAPPAARVPDTLMQSLAVNWR

SEQ ID NO: 62 - DNA, 11670 bp, Artificial Sequence
  plasmid comprising SEQ ID NO:60.
atcgagatctgtatggctgtgcaggtcgtaaatcactgcataattcgtgtcgctcaaggcgcactcccgttctggataatgttttttgcgccgacatcataacggttctggcaaatattctgaaatgagctgttgacaattaatcatcggctcgtataatgtgtggaattgtgagcggataacaattataattttgtttaactttaagaaggagatatacatatgcagcagtcccatcaggccggttacgcaaacgcagccgatcgtgaatctggtatcccggcagcggttctggatggtattaaggcagttgccaaagagaagaacgctaccctgatgttccgtctggtcaacccacactctacttccctgatcgcggaaggtgtggcgaccaaaggcctgggtgtgcacgccaaaagcagcgactggggtctgcaggcaggttatattccggtgaacccgaatctgtctaaactgttcggtcgtgccccggaggtgatcgcacgtgcagacaacgatgtcaactcttctctggcgcatggtcacaccgcggttgatctgaccctgtccaaagaacgcctggattacctgcgtcaggcgggcctggtgacgggcatggccgacggtgttgtagcgagcaaccacgcgggttatgaacaatttgagtttcgcgttaaagagacctctgacggtcgttacgcggtgcagtaccgccgcaaaggtggcgatgactttgaagctgtcaaagtgatcggtaacgctgctggaattggtcaggcggaaccggatcgcgcgcactacaacatcgttactttttgttgcaaatgtgattccactctgcgcctgtgtgtgcaatccacccacgtagacattcgcactctggaagacctgctgatgggtacccttggtattgtttgtccgatttgctcccagaagccggcgtctggcgttaaccaccaacacctgccggcgcgtcgcgcagagccgcagcgtcacaccatgctgtgcatgtgctgtaaatgtgaggcccgtatcgagctggtcgttgagtctagcgccgacgatctgcgtgcgtttcagcagctgttcctgaacacgctgagcttcgtttgcccgtggtgtgctagccagcagggcgtgtctcacgctcagctgccggcacgtcgtgctgagcctcagcgtcacaaaatcctgtgcgtgtgctgcaaatgcgatggccgcatcgaactgaccgtggaatctagcgcagaagacctgcgtacgctgcagcaactgttcctgagcacgctgtccttcgtatgcccttggtgcgcaactaatcagatgcacggtgacaccccgaccctgcacgaatacatgctggacctgcagccagaaaccaccgatctgtactgttacgaacagctgaacatgcatggcccaaaagctactctgcaggatatcgtcctgcatctggaaccacagaacgaaatcccggtagatctgctgtgccatgagcagctgatgcatggtccgcgtgaaaccctgcaggaaatcgttctgcacctggaaccgcaaaacgaactggacccggttgacctgctgtgctatgaacagctgccgggcctgcgccgtccgtccctgggcgcagtcgaacgtcaggactccggctacgattccctggatggcgttggctcccgctccttctccctgggcgaggtttctgacatggctgcggtggaagcggcagagctggaaatgacccgtcaagtgctgcacgcgggcgcacgtcaggacgatgctgagccgggcgtgtccggtgcgtctgcacactggggtcaacgtgccctgcagggtgctcaagctgtcgcggcagcgcagcgtctggtacatgcgatcgcactgatgacccagttcggtcgcgcaggttctaccaacactcctcaggaagcagctagcctgtctgctgctgttttcggtctgggcgaagcgtcttctgcggttgcagaaaccgtgagcggtttcttccgtggttctagccgctgggcgggtggttttggtgtagcaggtggcgctatggccctgggtggcggtatcgcggctgctgtcggcgcaggtatgagcctgaccgacgatgctcctgcgggccagaaagccgcagctggcgctgaaatcgcgctgcagctgactggtggtaccgttgaactggctagctctatcgcgctggctctggcagcggcacgtggcgtgacttctggcctgcaagtcgccggtgcctctgcgggcgctgctgcgggcgctctggcagctgcactgtcccccatggaaatctacggtctggtacagcagtctcactacgcagaccagctggataaactggcgcaggagtcttctgcatacggttacgaaggcgacgcactgctggcgcagctgtatcgtgacaaaactgctgctgaaggtgctgtggcaggcgtttctgcggtactgtctaccgttggcgctgcggtttctattgcggctgccgcatccgttgtaggtgcgccggttgctgtagttacctctctgctgactggtgcactgaacggtatcctgcgtggtgttcagcagcctattatcgaaaaactggcgaatgattatgcccgtaaaatcgacgaactgggcggtccgcaggcttattttgaaaaaaacctgcaggcgcgccacgaacagctggcaaacagcgacggcctgcgcaaaatgctggcagacctgcaagctggttggaacgcgtcttctgtgatcggcgtgcagaccaccgaaattagcaaatctgcgctggaactggctgcaattactggcaacgcggataacctgaaaagcgttgatgtttttgtcgatcgcttcgttcagggcgagcgcgttgctggtcagccggttgttctggacgttgcggcaggcggcatcgacatcgctagccgcaagggcgagcgtccggctctgactttcattaccccgctggcagctccgggtgaagaacagcgtcgccgtaccaagactggtaaaagcgagttcaccaccttcgtggaaatcgtaggtaaacaggaccgctggcgtattcgcgacggtgcggcggacaccaccatcgacctggcaaaagttgtttcccaactggtagatgctaacggcgtgctgaaacattctattaaactggatgtaatcggcggtgacggcgatgacgttgtactggcgaacgcgtctcgtatccactatgacggcggcgcaggtaccaacacggtttcctacgcagcgctgggccgccaggattccatcactgttagcgccgatggcgaacgtttcaacgtgcgtaaacagctgaataacgcaaacgtctatcgtgagggtgtagctacccagaccaccgcgtacggtaagcgtaccgaaaacgttcagtatcgtcacgtggaactggcacgtgtgggtcagctggtagaggtggatacgctggaacacgtgcagcacatcatcggtggcgccggtaacgattccattactggtaacgctcacgacaacttcctggcaggtggttctggtgatgatcgtctggacggtggtgcgggtaacgatacgctggtaggcggcgaaggtcagaacaccgtaattggtggtgccggtgacgacgttttcctgcaggatctgggcgtttggagcaaccagctggatggcggtgccggtgttgacacggttaagtataacgttcaccagccgtctgaagagcgcctggaacgtatgggtgacactggtattcatgccgatctgcagaaaggcactgttgaaaaatggcctgcgctgaacctgttctctgtggaccatgttaagaacattgaaaacctgcatggctctcgcctgaacgaccgtatcgctggtgacgaccaggataacgaactgtggggtcatgacggcaatgataccattcgcggtcgtggcggcgacgatattctgcgtggcggtctgggcctggataccctgtatggtgaagatggtaacgatattttcctgcaagacgatgaaacggtatctgatgacatcgacggtggtgcaggcctggacaccgtagattacagcgctatgatccatccgggtcgtatcgtagctccgcacgagtacggcttcggtatcgaggcggacctgtctcgtgaatgggttcgtaaagcgtccgcgctgggtgtggactactacgataacgttcgtaacgtggaaaacgtgatcggtacctccatgaaagacgtgctgattggcgacgcacaggccaacactctgatgggccagggcggtgatgacacggttcgcggcggcgacggtgatgacctgctgttcggtggtgacggcaacgacatgctgtacggcgacgcgggcaacgacaccctgtacggcggtctgggtgacgacactctggaaggtggtgcaggtaacgactggttcggccaaacccaggcacgcgaacacgacgtgctgcgtggtggcgacggcgtagacaccgtggattactcccaaactggcgctcacgcgggtatcgcggccggtcgtatcggtctgggcattctggccgatctgggtgccggccgtgtcgacaaactgggtgaggctggctctagcgcctatgatactgtttccggcatcgaaaacgtggtaggcactgaactggcagatcgtatcacgggtgacgcgcaagcgaacgttctgcgtggtgctggcggtgcagacgtgctggcgggtggtgaaggcgacgacgtactgctgggcggtgacggtgacgatcagctgagcggtgatgcgggtcgtgaccgtctgtacggtgaagcaggtgacgattggttcttccaggacgctgctaacgctggcaacctgctggacggcggcgatggccgtgacactgttgacttcagcggtccgggtcgcggtctggacgcaggcgcgaaaggcgttttcctgagcctgggtaagggtttcgcatctctgatggacgaaccagaaaccagcaatgtcctgcgtaacatcgaaaacgctgtcggttccgcacgcgatgatgttctgattggcgatgctggtgccaatgttctgaacggtctggcgggtaatgatgtactgtctggtggcgctggtgatgatgtcctgctgggtgatgagggcagcgatctgctgtccggcgatgccggcaacgacgatctgttcggtggccaaggtgatgatacttacctgttcggcgttggctatggtcatgacaccatctatgagtctggtggcggccacgatacgattcgtattaatgcaggtgctgaccaactgtggtttgcacgtcagggtaacgatctggaaattcgcatcctgggtactgatgacgctctgaccgtacacgactggtaccgcgatgcggatcaccgcgtagaaatcatccatgcggctaaccaagctgtagaccaggctggtattgaaaaactggtagaagcgatggcacagtatccggacccaggtgcggctgctgcagcacctccagcggctcgtgtgccggataccctgatgcagagcctggccgtcaattggcgttaatggatccaggcctctttagaaggagatataccatgctgccgtctgcacaggcgccgtctctgctgaatccaactgatgacttcgctgcgctgggtaacatcgcgtggctgtggatgaacagcccgatgcaccgtgactggccggttcacctgctggcacgtaacacgctggcgccgatccagctgggtcaatacatcctgctgcgttgtaacgacgtgcctgtggcgtattgctcctgggcactgatggatgcggataccgagctgtcctacgttatggccccatctagcctgggcggtaacgcttggaactgcggcgatcgtctgtggatcattgattggattgctccgtttagccgtgacgacaaccgtgctctgcgtcgcgcgctggccgaacgtcatccggattctgttggccgttccctgcgcgtacgtcgcggtggcgacaccgctcgcgtcaaagaataccgtggtcgtgctctggacgcagcggcggcccgcgctcagctggaccgctaccacgcagaactgattgccggtctgcgtgcatccaatggcggttatgctccgcgtggccgtggcaccgcataatctagaattctttaattaaagatccggctgctaacaaagcccgaaaggaagctgagttggctgctgccaccgctgagcaatccaggcatcaaataaaacgaaaggctcagtcgaaagactgggcctttcgttttatctgttgtttgtcggtgaacgctctcctgagtaggacaaatccgccgggagcggatttgaacgttgcgaagcaacggcccggagggtggcgggcaggacgcccgccataaactgccaggcatcaaattaagcagaaggccatcctgacggatggcctttttgctagcagcacgccatagtgactggcgatgctgtcggaatggacgatatcccgcaagaggcccggcagtaccggcataaccaagcctatgcctacagcatccagggtgacggtgccgaggatgacgatgagcgcattgttagatttcatacacggtgcctgactgcgttagcaatttaactgtgataaactaccgcattaaagcttatcgatgataagctgtcaaacatgagaattcttagaaaaactcatcgagcatcaaatgaaactgcaatttattcatatcaggattatcaataccatatttttgaaaaagccgtttctgtaatgaaggagaaaactcaccgaggcagttccataggatggcaagatcctggtatcggtctgcgattccgactcgtccaacatcaatacaacctattaatttcccctcgtcaaaaataaggttatcaagtgagaaatcaccatgagtgacgactgaatccggtgagaatggcaaaagcttatgcatttctttccagacttgttcaacaggccagccattacgctcgtcatcaaaatcactcgcatcaaccaaaccgttattcattcgtgattgcgcctgagcgagacgaaatacgcgatcgctgttaaaaggacaattacaaacaggaatcgaatgcaaccggcgcaggaacactgccagcgcatcaacaatattttcacctgaatcaggatattcttctaatacctggaatgctgttttcccggggatcgcagtggtgagtaaccatgcatcatcaggagtacggataaaatgcttgatggtcggaagaggcataaattccgtcagccagtttagtctgaccatctcatctgtaacatcattggcaacgctacctttgccatgtttcagaaacaactctggcgcatcgggcttcccatacaatcgatagattgtcgcacctgattgcccgacattatcgcgagcccatttatacccatataaatcagcatccatgttggaatttaatcgcggcctcgagcaagacgtttcccgttgaatatggctcataacaccccttgtattactgtttatgtaagcagacagttttattgttcatgaccaaaatcccttaacgtgagttttcgttccactgagcgtcagaccccgtagaaaagatcaaaggatcttcttgagatcctttttttctgcgcgtaatctgctgcttgcaaacaaaaaaaccaccgctaccagcggtggtttgtttgccggatcaagagctaccaactctttttccgaaggtaactggcttcagcagagcgcagataccaaatactgtccttctagtgtagccgtagttaggccaccacttcaagaactctgtagcaccgcctacatacctcgctctgctaatcctgttaccagtggctgctgccagtggcgataagtcgtgtcttaccgggttggactcaagacgatagttaccggataaggcgcagcggtcgggctgaacggggggttcgtgcacacagcccagcttggagcgaacgacctacaccgaactgagatacctacagcgtgagctatgagaaagcgccacgcttcccgaagggagaaaggcggacaggtatccggtaagcggcagggtcggaacaggagagcgcacgagggagcttccagggggaaacgcctggtatctttatagtcctgtcgggtttcgccacctctgacttgagcgtcgatttttgtgatgctcgtcaggggggcggagcctatggaaaaacgccagcaacgcggcctttttacggttcctggccttttgctggccttttgctcacatgttctttcctgcgttatcccctgattctgtggataaccgtattaccgcctttgagtgagctgataccgctcgccgcagccgaacgaccgagcgcagcgagtcagtgagcgaggaagcggaagagcgcctgatgcggtattttctccttacgcatctgtgcggtatttcacaccgcaatggtgcactctcagtacaatctgctctgatgccgcatagttaagccagtatacactccgctatcgctacgtgactgggtcatggctgcgccccgacacccgccaacacccgctgacgcgccctgacgggcttgtctgctcccggcatccgcttacagacaagctgtgaccgtctccgggagctgcatgtgtcagaggttttcaccgtcatcaccgaaacgcgcgaggcagctgcggtaaagctcatcagcgtggtcgtgaagcgattcacagatgtctgcctgttcatccgcgtccagctcgttgagtttctccagaagcgttaatgtctggcttctgataaagcgggccatgttaagggcggttttttcctgtttggtcactgatgcctccgtgtaagggggatttctgttcatgggggtaatgataccgatgaaacgagagaggatgctcacgatacgggttactgatgatgaacatgcccggttactggaacgttgtgagggtaaacaactggcggtatggatgcggcgggaccagagaaaaatcactcagggtcaatgccagcgcttcgttaatacagatgtaggtgttccacagggtagccagcagcatcctgcgatgcagatccggaacataatggtgcagggcgctgacttccgcgtttccagactttacgaaacacggaaaccgaagaccattcatgttgttgctcaggtcgcagacgttttgcagcagcagtcgcttcacgttcgctcgcgtatcggtgattcattctgctaaccagtaaggcaaccccgccagcctagccgggtcctcaacgacaggagcacgatcatgcgcacccgtggccaggacccaacgctgcccgagatgcgccgcgtgcggctgctggagatggcggacgcgatggatatgttctgccaagggttggtttgcgcattcacagttctccgcaagaattgattggctccaattcttggagtggtgaatccgttagcgaggtgccgccggcttccattcaggtcgaggtggcccggctccatgcaccgcgacgcaacgcggggaggcagacaaggtatagggcggcgcctacaatccatgccaacccgttccatgtgctcgccgaggcggcataaatcgccgtgacgatcagcggtccaatgatcgaagttaggctggtaagagccgcgagcgatccttgaagctgtccctgatggtcgtcatctacctgcctggacagcatggcctgcaacgcgggcatcccgatgccgccggaagcgagaagaatcataatggggaaggccatccagcctcgcgtcgcgaacgccagcaagacgtagcccagcgcgtcggccgccatgccggcgataatggcctgcttctcgccgaaacgtttggtggcgggaccagtgacgaaggcttgagcgagggcgtgcaagattccgaataccgcaagcgacaggccgatcatcgtcgcgctccagcgaaagcggtcctcgccgaaaatgacccagagcgctgccggcacctgtcctacgagttgcatgataaagaagacagtcataagtgcggcgacgatagtcatgccccgcgcccaccggaaggagctgactgggttgaaggctctcaagggcatcggtcgactcatagctgtttcctgtgtgaaattgttatccgctcacaattccacacaacatacgagccggaagcataaagtgtaaagcctggggtgcctaatgagtgagctaacttacattaattgcgttgcgctcactgcccgctttccagtcgggaaacctgtcgtgccagctgcattaatgaatcggccaacgcgcggggagaggcggtttgcgtattgggcgctagcgtggtttttcttttcaccagtgagacgggcaacagctgattgcccttcaccgcctggccctgagagagttgcagcaagcggtccacgctggtttgccccagcaggcgaaaatcctgtttgatggtggttaacggcgggatataacatgagctgtcttcggtatcgtcgtatcccactaccgagatatccgcaccaacgcgcagcccggactcggtaatggcgcgcattgcgcccagcgccatctgatcgttggcaaccagcatcgcagtgggaacgatgccctcattcagcatttgcatggtttgttgaaaaccggacatggcactccagtcgccttcccgttccgctatcggctgaatttgattgcgagtgagatatttatgccagccagccagacgcagacgcgccgagacagaacttaatgggcccgctaacagcgcgatttgctggtgacccaatgcgaccagatgctccacgcccagtcgcgtaccgtcttcatgggagaaaataatactgttgatgggtgtctggtcagagacatcaagaaataacgccggaacattagtgcaggcagcttccacagcaatggcatcctggtcatccagcggatagttaatgatcagcccactgacgcgttgcgcgagaagattgtgcaccgccgctttacaggcttcgacgccgcttcgttctaccatcgacaccaccacgctggcacccagttgatcggcgcgagatttaatcgccgcgacaatttgcgacggcgcgtgcagggccagactggaggtggcaacgccaatcagcaacgactgtttgcccgccagttgttgtgccacgcggttgggaatgtaattcagctccgccatcgccgcttccactttttcccgcgttttcgcagaaacgtggctggcctggttcaccacgcgggaaacggtctgataagagacaccggcatactctgcgacatcgtataacgttactggtttcacattcaccaccctgaattgactctcttccgggcgctatcatgccataccgcgaaaggttttgcgccattcgatggtgtcggaatttatgcggtgtgaaataccgcacagatgcgtaaggagaaaataccgcatcaggcgctcttccgcttcctcgctcactgactcgctgccaccccgtggcatgcaaggagatggcgcccaacagtcccccggccacggggcctgccaccatacccacgccgaaacaagcgctcatgagcccgaagtggcgagcccgatcttccccatcggtgatgtcggcgatataggcgccagcaaccgcacctgtggcgccggtgatgccggccacgatgcgtccggcgtagagg

SEQ ID NO: 63 - DNA, 5775 bp, Artificial Sequence
  Nucleotide encoding chimeric CyaA delta 93+ antigen HPV16, HVP18 and HPV45 full
  CDS (1)..(5775)
atgcagcagtcccatcaggccggttacgcaaacgcagccgatcgtgaatctggtatcccggcagcggttctggatggtattaaggcagttgccaaagagaagaacgctaccctgatgttccgtctggtcaacccacactctacttccctgatcgcggaaggtgtggcgaccaaaggcctgggtgtgcacgccaaaagcagcgactggggtctgcaggcaggttatattccggtgaacccgaatctgtctaaactgttcggtcgtgccccggaggtgatcgcacgtgcagacaacgatgtcaactcttctctggcgcatggtcacaccgcggttgatctgaccctgtccaaagaacgcctggattacctgcgtcaggcgggcctggtgacgggcatggccgacggtgttgtagcgagcaaccacgcgggttatgaacaatttgagtttcgcgttaaagagacctctgacggtcgttacgcggtgcagtaccgccgcaaaggtggcgatgactttgaagctgtcaaagtgatcggtaacgctgctggaattccgctgaccgcggatatcgacatgtttgccatcatgcctcacctgtccaactttcgcgattccgcacgcagctctgtgacgtctggtgattccgtcactgactacctggctcgtacccgtcgtgcggcctctgaagacgaaatcgacggccctgcgggccaggctgaaccagatcgtgctcactacaacatcgtaactttttgctgtaagtgcgatagcactctgcgtctgtgcgtacagtctactcacgttgatatccgcactctggaagatctgctgatgggtaccctgggtatcgtctgcccaatctgctctcaaaagcctgcttctggtgttaaccatcagcacctgccggctcgtcgcgctgaaccacagcgtcacacgatgctgtgcatgtgttgcaaatgcgaggctcgcatcgaactggttgttgaatccagcgctgacgacctgcgtgcgtttcagcaactgttcctgaacacgctgtcttttgtttgtccgtggtgtgcctcccagcaggagaacgatgaagcggatggcgtgtcccacgcgcagctgccggcacgtcgtgcagaaccgcagcgccacaagattctgtgcgtttgctgtaaatgtgatggccgtatcgaactgactgtggaatcctccgcggaagatctgcgtacgctgcagcagctgttcctgtctaccctgtctttcgtgtgcccgtggtgcgccaccaatcaaatgcacggcgacaccccgaccctgcacgaatacatgctggacctgcagccggaaaccacggatctgtattgttatgaacagctgaacgatagcagcgaggaaatgcacggtccgaaagcaactctgcaggacattgtgctgcatctggagccacagaacgaaatcccggttgatctgctgtgccacgagcaactgagcgattccgaagaggaaaacgacgaaattgatatgcatggtccgcgcgagaccctgcaagaaatcgtcctgcacctggaaccgcaaaacgaactggaccctgtagacctgctgtgctacgaacagctgtccgaatctgaagaagaatcccagatgctgactcgtggccagctgaaagaatacatcggccaacagcgtggcgaaggctacgttttctacgagaatcgtgcttacggcgttgcgggcaaatccctgttcgacgatggtctgggcgctgcaccgggcgttccgagcggccgttctaaattcagcccggacgtactggaaactgtgccggcttccccgggcctgcgccgtccgtccctgggcgcagtcgaacgtcaggactccggctacgattccctggatggcgttggctcccgctccttctccctgggcgaggtttctgacatggctgcggtggaagcggcagagctggaaatgacccgtcaagtgctgcacgcgggcgcacgtcaggacgatgctgagccgggcgtgtccggtgcgtctgcacactggggtcaacgtgccctgcagggtgctcaagctgtcgcggcagcgcagcgtctggtacatgcgatcgcactgatgacccagttcggtcgcgcaggttctaccaacactcctcaggaagcagctagcctgtctgctgctgttttcggtctgggcgaagcgtcttctgcggttgcagaaaccgtgagcggtttcttccgtggttctagccgctgggcgggtggttttggtgtagcaggtggcgctatggccctgggtggcggtatcgcggctgctgtcggcgcaggtatgagcctgaccgacgatgctcctgcgggccagaaagccgcagctggcgctgaaatcgcgctgcagctgactggtggtaccgttgaactggctagctctatcgcgctggctctggcagcggcacgtggcgtgacttctggcctgcaagtcgccggtgcctctgcgggcgctgctgcgggcgctctggcagctgcactgtcccccatggaaatctacggtctggtacagcagtctcactacgcagaccagctggataaactggcgcaggagtcttctgcatacggttacgaaggcgacgcactgctggcgcagctgtatcgtgacaaaactgctgctgaaggtgctgtggcaggcgtttctgcggtactgtctaccgttggcgctgcggtttctattgcggctgccgcatccgttgtaggtgcgccggttgctgtagttacctctctgctgactggtgcactgaacggtatcctgcgtggtgttcagcagcctattatcgaaaaactggcgaatgattatgcccgtaaaatcgacgaactgggcggtccgcaggcttattttgaaaaaaacctgcaggcgcgccacgaacagctggcaaacagcgacggcctgcgcaaaatgctggcagacctgcaagctggttggaacgcgtcttctgtgatcggcgtgcagaccaccgaaattagcaaatctgcgctggaactggctgcaattactggcaacgcggataacctgaaaagcgttgatgtttttgtcgatcgcttcgttcagggcgagcgcgttgctggtcagccggttgttctggacgttgcggcaggcggcatcgacatcgctagccgcaagggcgagcgtccggctctgactttcattaccccgctggcagctccgggtgaagaacagcgtcgccgtaccaagactggtaaaagcgagttcaccaccttcgtggaaatcgtaggtaaacaggaccgctggcgtattcgcgacggtgcggcggacaccaccatcgacctggcaaaagttgtttcccaactggtagatgctaacggcgtgctgaaacattctattaaactggatgtaatcggcggtgacggcgatgacgttgtactggcgaacgcgtctcgtatccactatgacggcggcgcaggtaccaacacggtttcctacgcagcgctgggccgccaggattccatcactgttagcgccgatggcgaacgtttcaacgtgcgtaaacagctgaataacgcaaacgtctatcgtgagggtgtagctacccagaccaccgcgtacggtaagcgtaccgaaaacgttcagtatcgtcacgtggaactggcacgtgtgggtcagctggtagaggtggatacgctggaacacgtgcagcacatcatcggtggcgccggtaacgattccattactggtaacgctcacgacaacttcctggcaggtggttctggtgatgatcgtctggacggtggtgcgggtaacgatacgctggtaggcggcgaaggtcagaacaccgtaattggtggtgccggtgacgacgttttcctgcaggatctgggcgtttggagcaaccagctggatggcggtgccggtgttgacacggttaagtataacgttcaccagccgtctgaagagcgcctggaacgtatgggtgacactggtattcatgccgatctgcagaaaggcactgttgaaaaatggcctgcgctgaacctgttctctgtggaccatgttaagaacattgaaaacctgcatggctctcgcctgaacgaccgtatcgctggtgacgaccaggataacgaactgtggggtcatgacggcaatgataccattcgcggtcgtggcggcgacgatattctgcgtggcggtctgggcctggataccctgtatggtgaagatggtaacgatattttcctgcaagacgatgaaacggtatctgatgacatcgacggtggtgcaggcctggacaccgtagattacagcgctatgatccatccgggtcgtatcgtagctccgcacgagtacggcttcggtatcgaggcggacctgtctcgtgaatgggttcgtaaagcgtccgcgctgggtgtggactactacgataacgttcgtaacgtggaaaacgtgatcggtacctccatgaaagacgtgctgattggcgacgcacaggccaacactctgatgggccagggcggtgatgacacggttcgcggcggcgacggtgatgacctgctgttcggtggtgacggcaacgacatgctgtacggcgacgcgggcaacgacaccctgtacggcggtctgggtgacgacactctggaaggtggtgcaggtaacgactggttcggccaaacccaggcacgcgaacacgacgtgctgcgtggtggcgacggcgtagacaccgtggattactcccaaactggcgctcacgcgggtatcgcggccggtcgtatcggtctgggcattctggccgatctgggtgccggccgtgtcgacaaactgggtgaggctggctctagcgcctatgatactgtttccggcatcgaaaacgtggtaggcactgaactggcagatcgtatcacgggtgacgcgcaagcgaacgttctgcgtggtgctggcggtgcagacgtgctggcgggtggtgaaggcgacgacgtactgctgggcggtgacggtgacgatcagctgagcggtgatgcgggtcgtgaccgtctgtacggtgaagcaggtgacgattggttcttccaggacgctgctaacgctggcaacctgctggacggcggcgatggccgtgacactgttgacttcagcggtccgggtcgcggtctggacgcaggcgcgaaaggcgttttcctgagcctgggtaagggtttcgcatctctgatggacgaaccagaaaccagcaatgtcctgcgtaacatcgaaaacgctgtcggttccgcacgcgatgatgttctgattggcgatgctggtgccaatgttctgaacggtctggcgggtaatgatgtactgtctggtggcgctggtgatgatgtcctgctgggtgatgagggcagcgatctgctgtccggcgatgccggcaacgacgatctgttcggtggccaaggtgatgatacttacctgttcggcgttggctatggtcatgacaccatctatgagtctggtggcggccacgatacgattcgtattaatgcaggtgctgaccaactgtggtttgcacgtcagggtaacgatctggaaattcgcatcctgggtactgatgacgctctgaccgtacacgactggtaccgcgatgcggatcaccgcgtagaaatcatccatgcggctaaccaagctgtagaccaggctggtattgaaaaactggtagaagcgatggcacagtatccggacccaggtgcggctgctgcagcacctccagcggctcgtgtgccggataccctgatgcagagcctggccgtcaattggcgttaa

SEQ ID NO: 64 - protein, 1924 aa, Artificial Sequence
  Synthetic Construct
MQQSHQAGYANAADRESGIPAAVLDGIKAVAKEKNATLMFRLVNPHSTSLIAEGVATKGLGVHAKSSDWGLQAGYIPVNPNLSKLFGRAPEVIARADNDVNSSLAHGHTAVDLTLSKERLDYLRQAGLVTGMADGVVASNHAGYEQFEFRVKETSDGRYAVQYRRKGGDDFEAVKVIGNAAGIPLTADIDMFAIMPHLSNFRDSARSSVTSGDSVTDYLARTRRAASEDEIDGPAGQAEPDRAHYNIVTFCCKCDSTLRLCVQSTHVDIRTLEDLLMGTLGIVCPICSQKPASGVNHQHLPARRAEPQRHTMLCMCCKCEARIELVVESSADDLRAFQQLFLNTLSFVCPWCASQQENDEADGVSHAQLPARRAEPQRHKILCVCCKCDGRIELTVESSAEDLRTLQQLFLSTLSFVCPWCATNQMHGDTPTLHEYMLDLQPETTDLYCYEQLNDSSEEMHGPKATLQDIVLHLEPQNEIPVDLLCHEQLSDSEEENDEIDMHGPRETLQEIVLHLEPQNELDPVDLLCYEQLSESEEESQMLTRGQLKEYIGQQRGEGYVFYENRAYGVAGKSLFDDGLGAAPGVPSGRSKFSPDVLETVPASPGLRRPSLGAVERQDSGYDSLDGVGSRSFSLGEVSDMAAVEAAELEMTRQVLHAGARQDDAEPGVSGASAHWGQRALQGAQAVAAAQRLVHAIALMTQFGRAGSTNTPQEAASLSAAVFGLGEASSAVAETVSGFFRGSSRWAGGFGVAGGAMALGGGIAAAVGAGMSLTDDAPAGQKAAAGAEIALQLTGGTVELASSIALALAAARGVTSGLQVAGASAGAAAGALAAALSPMEIYGLVQQSHYADQLDKLAQESSAYGYEGDALLAQLYRDKTAAEGAVAGVSAVLSTVGAAVSIAAAASVVGAPVAVVTSLLTGALNGILRGVQQPIIEKLANDYARKIDELGGPQAYFEKNLQARHEQLANSDGLRKMLADLQAGWNASSVIGVQTTEISKSALELAAITGNADNLKSVDVFVDRFVQGERVAGQPVVLDVAAGGIDIASRKGERPALTFITPLAAPGEEQRRRTKTGKSEFTTFVEIVGKQDRWRIRDGAADTTIDLAKVVSQLVDANGVLKHSIKLDVIGGDGDDVVLANASRIHYDGGAGTNTVSYAALGRQDSITVSADGERFNVRKQLNNANVYREGVATQTTAYGKRTENVQYRHVELARVGQLVEVDTLEHVQHIIGGAGNDSITGNAHDNFLAGGSGDDRLDGGAGNDTLVGGEGQNTVIGGAGDDVFLQDLGVWSNQLDGGAGVDTVKYNVHQPSEERLERMGDTGIHADLQKGTVEKWPALNLFSVDHVKNIENLHGSRLNDRIAGDDQDNELWGHDGNDTIRGRGGDDILRGGLGLDTLYGEDGNDIFLQDDETVSDDIDGGAGLDTVDYSAMIHPGRIVAPHEYGFGIEADLSREWVRKASALGVDYYDNVRNVENVIGTSMKDVLIGDAQANTLMGQGGDDTVRGGDGDDLLFGGDGNDMLYGDAGNDTLYGGLGDDTLEGGAGNDWFGQTQAREHDVLRGGDGVDTVDYSQTGAHAGIAAGRIGLGILADLGAGRVDKLGEAGSSAYDTVSGIENVVGTELADRITGDAQANVLRGAGGADVLAGGEGDDVLLGGDGDDQLSGDAGRDRLYGEAGDDWFFQDAANAGNLLDGGDGRDTVDFSGPGRGLDAGAKGVFLSLGKGFASLMDEPETSNVLRNIENAVGSARDDVLIGDAGANVLNGLAGNDVLSGGAGDDVLLGDEGSDLLSGDAGNDDLFGGQGDDTYLFGVGYGHDTIYESGGGHDTIRINAGADQLWFARQGNDLEIRILGTDDALTVHDWYRDADHRVEIIHAANQAVDQAGIEKLVEAMAQYPDPGAAAAAPPAARVPDTLMQSLAVNWR

SEQ ID NO: 65 - DNA, 12105 bp, Artificial Sequence
  Plasmid comprising SEQ ID NO:63
atcgagatctgtatggctgtgcaggtcgtaaatcactgcataattcgtgtcgctcaaggcgcactcccgttctggataatgttttttgcgccgacatcataacggttctggcaaatattctgaaatgagctgttgacaattaatcatcggctcgtataatgtgtggaattgtgagcggataacaattataattttgtttaactttaagaaggagatatacatatgcagcagtcccatcaggccggttacgcaaacgcagccgatcgtgaatctggtatcccggcagcggttctggatggtattaaggcagttgccaaagagaagaacgctaccctgatgttccgtctggtcaacccacactctacttccctgatcgcggaaggtgtggcgaccaaaggcctgggtgtgcacgccaaaagcagcgactggggtctgcaggcaggttatattccggtgaacccgaatctgtctaaactgttcggtcgtgccccggaggtgatcgcacgtgcagacaacgatgtcaactcttctctggcgcatggtcacaccgcggttgatctgaccctgtccaaagaacgcctggattacctgcgtcaggcgggcctggtgacgggcatggccgacggtgttgtagcgagcaaccacgcgggttatgaacaatttgagtttcgcgttaaagagacctctgacggtcgttacgcggtgcagtaccgccgcaaaggtggcgatgactttgaagctgtcaaagtgatcggtaacgctgctggaattccgctgaccgcggatatcgacatgtttgccatcatgcctcacctgtccaactttcgcgattccgcacgcagctctgtgacgtctggtgattccgtcactgactacctggctcgtacccgtcgtgcggcctctgaagacgaaatcgacggccctgcgggccaggctgaaccagatcgtgctcactacaacatcgtaactttttgctgtaagtgcgatagcactctgcgtctgtgcgtacagtctactcacgttgatatccgcactctggaagatctgctgatgggtaccctgggtatcgtctgcccaatctgctctcaaaagcctgcttctggtgttaaccatcagcacctgccggctcgtcgcgctgaaccacagcgtcacacgatgctgtgcatgtgttgcaaatgcgaggctcgcatcgaactggttgttgaatccagcgctgacgacctgcgtgcgtttcagcaactgttcctgaacacgctgtcttttgtttgtccgtggtgtgcctcccagcaggagaacgatgaagcggatggcgtgtcccacgcgcagctgccggcacgtcgtgcagaaccgcagcgccacaagattctgtgcgtttgctgtaaatgtgatggccgtatcgaactgactgtggaatcctccgcggaagatctgcgtacgctgcagcagctgttcctgtctaccctgtctttcgtgtgcccgtggtgcgccaccaatcaaatgcacggcgacaccccgaccctgcacgaatacatgctggacctgcagccggaaaccacggatctgtattgttatgaacagctgaacgatagcagcgaggaaatgcacggtccgaaagcaactctgcaggacattgtgctgcatctggagccacagaacgaaatcccggttgatctgctgtgccacgagcaactgagcgattccgaagaggaaaacgacgaaattgatatgcatggtccgcgcgagaccctgcaagaaatcgtcctgcacctggaaccgcaaaacgaactggaccctgtagacctgctgtgctacgaacagctgtccgaatctgaagaagaatcccagatgctgactcgtggccagctgaaagaatacatcggccaacagcgtggcgaaggctacgttttctacgagaatcgtgcttacggcgttgcgggcaaatccctgttcgacgatggtctgggcgctgcaccgggcgttccgagcggccgttctaaattcagcccggacgtactggaaactgtgccggcttccccgggcctgcgccgtccgtccctgggcgcagtcgaacgtcaggactccggctacgattccctggatggcgttggctcccgctccttctccctgggcgaggtttctgacatggctgcggtggaagcggcagagctggaaatgacccgtcaagtgctgcacgcgggcgcacgtcaggacgatgctgagccgggcgtgtccggtgcgtctgcacactggggtcaacgtgccctgcagggtgctcaagctgtcgcggcagcgcagcgtctggtacatgcgatcgcactgatgacccagttcggtcgcgcaggttctaccaacactcctcaggaagcagctagcctgtctgctgctgttttcggtctgggcgaagcgtcttctgcggttgcagaaaccgtgagcggtttcttccgtggttctagccgctgggcgggtggttttggtgtagcaggtggcgctatggccctgggtggcggtatcgcggctgctgtcggcgcaggtatgagcctgaccgacgatgctcctgcgggccagaaagccgcagctggcgctgaaatcgcgctgcagctgactggtggtaccgttgaactggctagctctatcgcgctggctctggcagcggcacgtggcgtgacttctggcctgcaagtcgccggtgcctctgcgggcgctgctgcgggcgctctggcagctgcactgtcccccatggaaatctacggtctggtacagcagtctcactacgcagaccagctggataaactggcgcaggagtcttctgcatacggttacgaaggcgacgcactgctggcgcagctgtatcgtgacaaaactgctgctgaaggtgctgtggcaggcgtttctgcggtactgtctaccgttggcgctgcggtttctattgcggctgccgcatccgttgtaggtgcgccggttgctgtagttacctctctgctgactggtgcactgaacggtatcctgcgtggtgttcagcagcctattatcgaaaaactggcgaatgattatgcccgtaaaatcgacgaactgggcggtccgcaggcttattttgaaaaaaacctgcaggcgcgccacgaacagctggcaaacagcgacggcctgcgcaaaatgctggcagacctgcaagctggttggaacgcgtcttctgtgatcggcgtgcagaccaccgaaattagcaaatctgcgctggaactggctgcaattactggcaacgcggataacctgaaaagcgttgatgtttttgtcgatcgcttcgttcagggcgagcgcgttgctggtcagccggttgttctggacgttgcggcaggcggcatcgacatcgctagccgcaagggcgagcgtccggctctgactttcattaccccgctggcagctccgggtgaagaacagcgtcgccgtaccaagactggtaaaagcgagttcaccaccttcgtggaaatcgtaggtaaacaggaccgctggcgtattcgcgacggtgcggcggacaccaccatcgacctggcaaaagttgtttcccaactggtagatgctaacggcgtgctgaaacattctattaaactggatgtaatcggcggtgacggcgatgacgttgtactggcgaacgcgtctcgtatccactatgacggcggcgcaggtaccaacacggtttcctacgcagcgctgggccgccaggattccatcactgttagcgccgatggcgaacgtttcaacgtgcgtaaacagctgaataacgcaaacgtctatcgtgagggtgtagctacccagaccaccgcgtacggtaagcgtaccgaaaacgttcagtatcgtcacgtggaactggcacgtgtgggtcagctggtagaggtggatacgctggaacacgtgcagcacatcatcggtggcgccggtaacgattccattactggtaacgctcacgacaacttcctggcaggtggttctggtgatgatcgtctggacggtggtgcgggtaacgatacgctggtaggcggcgaaggtcagaacaccgtaattggtggtgccggtgacgacgttttcctgcaggatctgggcgtttggagcaaccagctggatggcggtgccggtgttgacacggttaagtataacgttcaccagccgtctgaagagcgcctggaacgtatgggtgacactggtattcatgccgatctgcagaaaggcactgttgaaaaatggcctgcgctgaacctgttctctgtggaccatgttaagaacattgaaaacctgcatggctctcgcctgaacgaccgtatcgctggtgacgaccaggataacgaactgtggggtcatgacggcaatgataccattcgcggtcgtggcggcgacgatattctgcgtggcggtctgggcctggataccctgtatggtgaagatggtaacgatattttcctgcaagacgatgaaacggtatctgatgacatcgacggtggtgcaggcctggacaccgtagattacagcgctatgatccatccgggtcgtatcgtagctccgcacgagtacggcttcggtatcgaggcggacctgtctcgtgaatgggttcgtaaagcgtccgcgctgggtgtggactactacgataacgttcgtaacgtggaaaacgtgatcggtacctccatgaaagacgtgctgattggcgacgcacaggccaacactctgatgggccagggcggtgatgacacggttcgcggcggcgacggtgatgacctgctgttcggtggtgacggcaacgacatgctgtacggcgacgcgggcaacgacaccctgtacggcggtctgggtgacgacactctggaaggtggtgcaggtaacgactggttcggccaaacccaggcacgcgaacacgacgtgctgcgtggtggcgacggcgtagacaccgtggattactcccaaactggcgctcacgcgggtatcgcggccggtcgtatcggtctgggcattctggccgatctgggtgccggccgtgtcgacaaactgggtgaggctggctctagcgcctatgatactgtttccggcatcgaaaacgtggtaggcactgaactggcagatcgtatcacgggtgacgcgcaagcgaacgttctgcgtggtgctggcggtgcagacgtgctggcgggtggtgaaggcgacgacgtactgctgggcggtgacggtgacgatcagctgagcggtgatgcgggtcgtgaccgtctgtacggtgaagcaggtgacgattggttcttccaggacgctgctaacgctggcaacctgctggacggcggcgatggccgtgacactgttgacttcagcggtccgggtcgcggtctggacgcaggcgcgaaaggcgttttcctgagcctgggtaagggtttcgcatctctgatggacgaaccagaaaccagcaatgtcctgcgtaacatcgaaaacgctgtcggttccgcacgcgatgatgttctgattggcgatgctggtgccaatgttctgaacggtctggcgggtaatgatgtactgtctggtggcgctggtgatgatgtcctgctgggtgatgagggcagcgatctgctgtccggcgatgccggcaacgacgatctgttcggtggccaaggtgatgatacttacctgttcggcgttggctatggtcatgacaccatctatgagtctggtggcggccacgatacgattcgtattaatgcaggtgctgaccaactgtggtttgcacgtcagggtaacgatctggaaattcgcatcctgggtactgatgacgctctgaccgtacacgactggtaccgcgatgcggatcaccgcgtagaaatcatccatgcggctaaccaagctgtagaccaggctggtattgaaaaactggtagaagcgatggcacagtatccggacccaggtgcggctgctgcagcacctccagcggctcgtgtgccggataccctgatgcagagcctggccgtcaattggcgttaatggatccaggcctctttagaaggagatataccatgctgccgtctgcacaggcgccgtctctgctgaatccaactgatgacttcgctgcgctgggtaacatcgcgtggctgtggatgaacagcccgatgcaccgtgactggccggttcacctgctggcacgtaacacgctggcgccgatccagctgggtcaatacatcctgctgcgttgtaacgacgtgcctgtggcgtattgctcctgggcactgatggatgcggataccgagctgtcctacgttatggccccatctagcctgggcggtaacgcttggaactgcggcgatcgtctgtggatcattgattggattgctccgtttagccgtgacgacaaccgtgctctgcgtcgcgcgctggccgaacgtcatccggattctgttggccgttccctgcgcgtacgtcgcggtggcgacaccgctcgcgtcaaagaataccgtggtcgtgctctggacgcagcggcggcccgcgctcagctggaccgctaccacgcagaactgattgccggtctgcgtgcatccaatggcggttatgctccgcgtggccgtggcaccgcataatctagaattctttaattaaagatccggctgctaacaaagcccgaaaggaagctgagttggctgctgccaccgctgagcaatccaggcatcaaataaaacgaaaggctcagtcgaaagactgggcctttcgttttatctgttgtttgtcggtgaacgctctcctgagtaggacaaatccgccgggagcggatttgaacgttgcgaagcaacggcccggagggtggcgggcaggacgcccgccataaactgccaggcatcaaattaagcagaaggccatcctgacggatggcctttttgctagcagcacgccatagtgactggcgatgctgtcggaatggacgatatcccgcaagaggcccggcagtaccggcataaccaagcctatgcctacagcatccagggtgacggtgccgaggatgacgatgagcgcattgttagatttcatacacggtgcctgactgcgttagcaatttaactgtgataaactaccgcattaaagcttatcgatgataagctgtcaaacatgagaattcttagaaaaactcatcgagcatcaaatgaaactgcaatttattcatatcaggattatcaataccatatttttgaaaaagccgtttctgtaatgaaggagaaaactcaccgaggcagttccataggatggcaagatcctggtatcggtctgcgattccgactcgtccaacatcaatacaacctattaatttcccctcgtcaaaaataaggttatcaagtgagaaatcaccatgagtgacgactgaatccggtgagaatggcaaaagcttatgcatttctttccagacttgttcaacaggccagccattacgctcgtcatcaaaatcactcgcatcaaccaaaccgttattcattcgtgattgcgcctgagcgagacgaaatacgcgatcgctgttaaaaggacaattacaaacaggaatcgaatgcaaccggcgcaggaacactgccagcgcatcaacaatattttcacctgaatcaggatattcttctaatacctggaatgctgttttcccggggatcgcagtggtgagtaaccatgcatcatcaggagtacggataaaatgcttgatggtcggaagaggcataaattccgtcagccagtttagtctgaccatctcatctgtaacatcattggcaacgctacctttgccatgtttcagaaacaactctggcgcatcgggcttcccatacaatcgatagattgtcgcacctgattgcccgacattatcgcgagcccatttatacccatataaatcagcatccatgttggaatttaatcgcggcctcgagcaagacgtttcccgttgaatatggctcataacaccccttgtattactgtttatgtaagcagacagttttattgttcatgaccaaaatcccttaacgtgagttttcgttccactgagcgtcagaccccgtagaaaagatcaaaggatcttcttgagatcctttttttctgcgcgtaatctgctgcttgcaaacaaaaaaaccaccgctaccagcggtggtttgtttgccggatcaagagctaccaactctttttccgaaggtaactggcttcagcagagcgcagataccaaatactgtccttctagtgtagccgtagttaggccaccacttcaagaactctgtagcaccgcctacatacctcgctctgctaatcctgttaccagtggctgctgccagtggcgataagtcgtgtcttaccgggttggactcaagacgatagttaccggataaggcgcagcggtcgggctgaacggggggttcgtgcacacagcccagcttggagcgaacgacctacaccgaactgagatacctacagcgtgagctatgagaaagcgccacgcttcccgaagggagaaaggcggacaggtatccggtaagcggcagggtcggaacaggagagcgcacgagggagcttccagggggaaacgcctggtatctttatagtcctgtcgggtttcgccacctctgacttgagcgtcgatttttgtgatgctcgtcaggggggcggagcctatggaaaaacgccagcaacgcggcctttttacggttcctggccttttgctggccttttgctcacatgttctttcctgcgttatcccctgattctgtggataaccgtattaccgcctttgagtgagctgataccgctcgccgcagccgaacgaccgagcgcagcgagtcagtgagcgaggaagcggaagagcgcctgatgcggtattttctccttacgcatctgtgcggtatttcacaccgcaatggtgcactctcagtacaatctgctctgatgccgcatagttaagccagtatacactccgctatcgctacgtgactgggtcatggctgcgccccgacacccgccaacacccgctgacgcgccctgacgggcttgtctgctcccggcatccgcttacagacaagctgtgaccgtctccgggagctgcatgtgtcagaggttttcaccgtcatcaccgaaacgcgcgaggcagctgcggtaaagctcatcagcgtggtcgtgaagcgattcacagatgtctgcctgttcatccgcgtccagctcgttgagtttctccagaagcgttaatgtctggcttctgataaagcgggccatgttaagggcggttttttcctgtttggtcactgatgcctccgtgtaagggggatttctgttcatgggggtaatgataccgatgaaacgagagaggatgctcacgatacgggttactgatgatgaacatgcccggttactggaacgttgtgagggtaaacaactggcggtatggatgcggcgggaccagagaaaaatcactcagggtcaatgccagcgcttcgttaatacagatgtaggtgttccacagggtagccagcagcatcctgcgatgcagatccggaacataatggtgcagggcgctgacttccgcgtttccagactttacgaaacacggaaaccgaagaccattcatgttgttgctcaggtcgcagacgttttgcagcagcagtcgcttcacgttcgctcgcgtatcggtgattcattctgctaaccagtaaggcaaccccgccagcctagccgggtcctcaacgacaggagcacgatcatgcgcacccgtggccaggacccaacgctgcccgagatgcgccgcgtgcggctgctggagatggcggacgcgatggatatgttctgccaagggttggtttgcgcattcacagttctccgcaagaattgattggctccaattcttggagtggtgaatccgttagcgaggtgccgccggcttccattcaggtcgaggtggcccggctccatgcaccgcgacgcaacgcggggaggcagacaaggtatagggcggcgcctacaatccatgccaacccgttccatgtgctcgccgaggcggcataaatcgccgtgacgatcagcggtccaatgatcgaagttaggctggtaagagccgcgagcgatccttgaagctgtccctgatggtcgtcatctacctgcctggacagcatggcctgcaacgcgggcatcccgatgccgccggaagcgagaagaatcataatggggaaggccatccagcctcgcgtcgcgaacgccagcaagacgtagcccagcgcgtcggccgccatgccggcgataatggcctgcttctcgccgaaacgtttggtggcgggaccagtgacgaaggcttgagcgagggcgtgcaagattccgaataccgcaagcgacaggccgatcatcgtcgcgctccagcgaaagcggtcctcgccgaaaatgacccagagcgctgccggcacctgtcctacgagttgcatgataaagaagacagtcataagtgcggcgacgatagtcatgccccgcgcccaccggaaggagctgactgggttgaaggctctcaagggcatcggtcgactcatagctgtttcctgtgtgaaattgttatccgctcacaattccacacaacatacgagccggaagcataaagtgtaaagcctggggtgcctaatgagtgagctaacttacattaattgcgttgcgctcactgcccgctttccagtcgggaaacctgtcgtgccagctgcattaatgaatcggccaacgcgcggggagaggcggtttgcgtattgggcgctagcgtggtttttcttttcaccagtgagacgggcaacagctgattgcccttcaccgcctggccctgagagagttgcagcaagcggtccacgctggtttgccccagcaggcgaaaatcctgtttgatggtggttaacggcgggatataacatgagctgtcttcggtatcgtcgtatcccactaccgagatatccgcaccaacgcgcagcccggactcggtaatggcgcgcattgcgcccagcgccatctgatcgttggcaaccagcatcgcagtgggaacgatgccctcattcagcatttgcatggtttgttgaaaaccggacatggcactccagtcgccttcccgttccgctatcggctgaatttgattgcgagtgagatatttatgccagccagccagacgcagacgcgccgagacagaacttaatgggcccgctaacagcgcgatttgctggtgacccaatgcgaccagatgctccacgcccagtcgcgtaccgtcttcatgggagaaaataatactgttgatgggtgtctggtcagagacatcaagaaataacgccggaacattagtgcaggcagcttccacagcaatggcatcctggtcatccagcggatagttaatgatcagcccactgacgcgttgcgcgagaagattgtgcaccgccgctttacaggcttcgacgccgcttcgttctaccatcgacaccaccacgctggcacccagttgatcggcgcgagatttaatcgccgcgacaatttgcgacggcgcgtgcagggccagactggaggtggcaacgccaatcagcaacgactgtttgcccgccagttgttgtgccacgcggttgggaatgtaattcagctccgccatcgccgcttccactttttcccgcgttttcgcagaaacgtggctggcctggttcaccacgcgggaaacggtctgataagagacaccggcatactctgcgacatcgtataacgttactggtttcacattcaccaccctgaattgactctcttccgggcgctatcatgccataccgcgaaaggttttgcgccattcgatggtgtcggaatttatgcggtgtgaaataccgcacagatgcgtaaggagaaaataccgcatcaggcgctcttccgcttcctcgctcactgactcgctgccaccccgtggcatgcaaggagatggcgcccaacagtcccccggccacggggcctgccaccatacccacgccgaaacaagcgctcatgagcccgaagtggcgagcccgatcttccccatcggtgatgtcggcgatataggcgccagcaaccgcacctgtggcgccggtgatgccggccacgatgcgtccggcgtagagg

SEQ ID NO: 66 - DNA, 5445 bp, Artificial Sequence
  Nucleotide encoding chimeric CyaA delta 203+ antigen HPV16, HVP18 and HPV45 full
  CDS (1)..(5445)
atgcagcagtcccatcaggccggttacgcaaacgcagccgatcgtgaatctggtatcccggcagcggttctggatggtattaaggcagttgccaaagagaagaacgctaccctgatgttccgtctggtcaacccacactctacttccctgatcgcggaaggtgtggcgaccaaaggcctgggtgtgcacgccaaaagcagcgactggggtctgcaggcaggttatattccggtgaacccgaatctgtctaaactgttcggtcgtgccccggaggtgatcgcacgtgcagacaacgatgtcaactcttctctggcgcatggtcacaccgcggttgatctgaccctgtccaaagaacgcctggattacctgcgtcaggcgggcctggtgacgggcatggccgacggtgttgtagcgagcaaccacgcgggttatgaacaatttgagtttcgcgttaaagagacctctgacggtcgttacgcggtgcagtaccgccgcaaaggtggcgatgactttgaagctgtcaaagtgatcggtaacgctgctggaattgaagacgaaatcgacggccctgcgggccaggctgaaccagatcgtgctcactacaacatcgtaactttttgctgtaagtgcgatagcactctgcgtctgtgcgtacagtctactcacgttgatatccgcactctggaagatctgctgatgggtaccctgggtatcgtctgcccaatctgctctcaaaagcctgcttctggtgttaaccatcagcacctgccggctcgtcgcgctgaaccacagcgtcacacgatgctgtgcatgtgttgcaaatgcgaggctcgcatcgaactggttgttgaatccagcgctgacgacctgcgtgcgtttcagcaactgttcctgaacacgctgtcttttgtttgtccgtggtgtgcctcccagcaggagaacgatgaagcggatggcgtgtcccacgcgcagctgccggcacgtcgtgcagaaccgcagcgccacaagattctgtgcgtttgctgtaaatgtgatggccgtatcgaactgactgtggaatcctccgcggaagatctgcgtacgctgcagcagctgttcctgtctaccctgtctttcgtgtgcccgtggtgcgccaccaatcaaatgcacggcgacaccccgaccctgcacgaatacatgctggacctgcagccggaaaccacggatctgtattgttatgaacagctgaacgatagcagcgaggaaatgcacggtccgaaagcaactctgcaggacattgtgctgcatctggagccacagaacgaaatcccggttgatctgctgtgccacgagcaactgagcgattccgaagaggaaaacgacgaaattgatatgcatggtccgcgcgagaccctgcaagaaatcgtcctgcacctggaaccgcaaaacgaactggaccctgtagacctgctgtgctacgaacagctgtccgaatctgaagaaccgggcctgcgccgtccgtccctgggcgcagtcgaacgtcaggactccggctacgattccctggatggcgttggctcccgctccttctccctgggcgaggtttctgacatggctgcggtggaagcggcagagctggaaatgacccgtcaagtgctgcacgcgggcgcacgtcaggacgatgctgagccgggcgtgtccggtgcgtctgcacactggggtcaacgtgccctgcagggtgctcaagctgtcgcggcagcgcagcgtctggtacatgcgatcgcactgatgacccagttcggtcgcgcaggttctaccaacactcctcaggaagcagctagcctgtctgctgctgttttcggtctgggcgaagcgtcttctgcggttgcagaaaccgtgagcggtttcttccgtggttctagccgctgggcgggtggttttggtgtagcaggtggcgctatggccctgggtggcggtatcgcggctgctgtcggcgcaggtatgagcctgaccgacgatgctcctgcgggccagaaagccgcagctggcgctgaaatcgcgctgcagctgactggtggtaccgttgaactggctagctctatcgcgctggctctggcagcggcacgtggcgtgacttctggcctgcaagtcgccggtgcctctgcgggcgctgctgcgggcgctctggcagctgcactgtcccccatggaaatctacggtctggtacagcagtctcactacgcagaccagctggataaactggcgcaggagtcttctgcatacggttacgaaggcgacgcactgctggcgcagctgtatcgtgacaaaactgctgctgaaggtgctgtggcaggcgtttctgcggtactgtctaccgttggcgctgcggtttctattgcggctgccgcatccgttgtaggtgcgccggttgctgtagttacctctctgctgactggtgcactgaacggtatcctgcgtggtgttcagcagcctattatcgaaaaactggcgaatgattatgcccgtaaaatcgacgaactgggcggtccgcaggcttattttgaaaaaaacctgcaggcgcgccacgaacagctggcaaacagcgacggcctgcgcaaaatgctggcagacctgcaagctggttggaacgcgtcttctgtgatcggcgtgcagaccaccgaaattagcaaatctgcgctggaactggctgcaattactggcaacgcggataacctgaaaagcgttgatgtttttgtcgatcgcttcgttcagggcgagcgcgttgctggtcagccggttgttctggacgttgcggcaggcggcatcgacatcgctagccgcaagggcgagcgtccggctctgactttcattaccccgctggcagctccgggtgaagaacagcgtcgccgtaccaagactggtaaaagcgagttcaccaccttcgtggaaatcgtaggtaaacaggaccgctggcgtattcgcgacggtgcggcggacaccaccatcgacctggcaaaagttgtttcccaactggtagatgctaacggcgtgctgaaacattctattaaactggatgtaatcggcggtgacggcgatgacgttgtactggcgaacgcgtctcgtatccactatgacggcggcgcaggtaccaacacggtttcctacgcagcgctgggccgccaggattccatcactgttagcgccgatggcgaacgtttcaacgtgcgtaaacagctgaataacgcaaacgtctatcgtgagggtgtagctacccagaccaccgcgtacggtaagcgtaccgaaaacgttcagtatcgtcacgtggaactggcacgtgtgggtcagctggtagaggtggatacgctggaacacgtgcagcacatcatcggtggcgccggtaacgattccattactggtaacgctcacgacaacttcctggcaggtggttctggtgatgatcgtctggacggtggtgcgggtaacgatacgctggtaggcggcgaaggtcagaacaccgtaattggtggtgccggtgacgacgttttcctgcaggatctgggcgtttggagcaaccagctggatggcggtgccggtgttgacacggttaagtataacgttcaccagccgtctgaagagcgcctggaacgtatgggtgacactggtattcatgccgatctgcagaaaggcactgttgaaaaatggcctgcgctgaacctgttctctgtggaccatgttaagaacattgaaaacctgcatggctctcgcctgaacgaccgtatcgctggtgacgaccaggataacgaactgtggggtcatgacggcaatgataccattcgcggtcgtggcggcgacgatattctgcgtggcggtctgggcctggataccctgtatggtgaagatggtaacgatattttcctgcaagacgatgaaacggtatctgatgacatcgacggtggtgcaggcctggacaccgtagattacagcgctatgatccatccgggtcgtatcgtagctccgcacgagtacggcttcggtatcgaggcggacctgtctcgtgaatgggttcgtaaagcgtccgcgctgggtgtggactactacgataacgttcgtaacgtggaaaacgtgatcggtacctccatgaaagacgtgctgattggcgacgcacaggccaacactctgatgggccagggcggtgatgacacggttcgcggcggcgacggtgatgacctgctgttcggtggtgacggcaacgacatgctgtacggcgacgcgggcaacgacaccctgtacggcggtctgggtgacgacactctggaaggtggtgcaggtaacgactggttcggccaaacccaggcacgcgaacacgacgtgctgcgtggtggcgacggcgtagacaccgtggattactcccaaactggcgctcacgcgggtatcgcggccggtcgtatcggtctgggcattctggccgatctgggtgccggccgtgtcgacaaactgggtgaggctggctctagcgcctatgatactgtttccggcatcgaaaacgtggtaggcactgaactggcagatcgtatcacgggtgacgcgcaagcgaacgttctgcgtggtgctggcggtgcagacgtgctggcgggtggtgaaggcgacgacgtactgctgggcggtgacggtgacgatcagctgagcggtgatgcgggtcgtgaccgtctgtacggtgaagcaggtgacgattggttcttccaggacgctgctaacgctggcaacctgctggacggcggcgatggccgtgacactgttgacttcagcggtccgggtcgcggtctggacgcaggcgcgaaaggcgttttcctgagcctgggtaagggtttcgcatctctgatggacgaaccagaaaccagcaatgtcctgcgtaacatcgaaaacgctgtcggttccgcacgcgatgatgttctgattggcgatgctggtgccaatgttctgaacggtctggcgggtaatgatgtactgtctggtggcgctggtgatgatgtcctgctgggtgatgagggcagcgatctgctgtccggcgatgccggcaacgacgatctgttcggtggccaaggtgatgatacttacctgttcggcgttggctatggtcatgacaccatctatgagtctggtggcggccacgatacgattcgtattaatgcaggtgctgaccaactgtggtttgcacgtcagggtaacgatctggaaattcgcatcctgggtactgatgacgctctgaccgtacacgactggtaccgcgatgcggatcaccgcgtagaaatcatccatgcggctaaccaagctgtagaccaggctggtattgaaaaactggtagaagcgatggcacagtatccggacccaggtgcggctgctgcagcacctccagcggctcgtgtgccggataccctgatgcagagcctggccgtcaattggcgttaa

SEQ ID NO: 67 - protein, 1814 aa, Artificial Sequence
  Synthetic Construct
MQQSHQAGYANAADRESGIPAAVLDGIKAVAKEKNATLMFRLVNPHSTSLIAEGVATKGLGVHAKSSDWGLQAGYIPVNPNLSKLFGRAPEVIARADNDVNSSLAHGHTAVDLTLSKERLDYLRQAGLVTGMADGVVASNHAGYEQFEFRVKETSDGRYAVQYRRKGGDDFEAVKVIGNAAGIEDEIDGPAGQAEPDRAHYNIVTFCCKCDSTLRLCVQSTHVDIRTLEDLLMGTLGIVCPICSQKPASGVNHQHLPARRAEPQRHTMLCMCCKCEARIELVVESSADDLRAFQQLFLNTLSFVCPWCASQQENDEADGVSHAQLPARRAEPQRHKILCVCCKCDGRIELTVESSAEDLRTLQQLFLSTLSFVCPWCATNQMHGDTPTLHEYMLDLQPETTDLYCYEQLNDSSEEMHGPKATLQDIVLHLEPQNEIPVDLLCHEQLSDSEEENDEIDMHGPRETLQEIVLHLEPQNELDPVDLLCYEQLSESEEPGLRRPSLGAVERQDSGYDSLDGVGSRSFSLGEVSDMAAVEAAELEMTRQVLHAGARQDDAEPGVSGASAHWGQRALQGAQAVAAAQRLVHAIALMTQFGRAGSTNTPQEAASLSAAVFGLGEASSAVAETVSGFFRGSSRWAGGFGVAGGAMALGGGIAAAVGAGMSLTDDAPAGQKAAAGAEIALQLTGGTVELASSIALALAAARGVTSGLQVAGASAGAAAGALAAALSPMEIYGLVQQSHYADQLDKLAQESSAYGYEGDALLAQLYRDKTAAEGAVAGVSAVLSTVGAAVSIAAAASVVGAPVAVVTSLLTGALNGILRGVQQPIIEKLANDYARKIDELGGPQAYFEKNLQARHEQLANSDGLRKMLADLQAGWNASSVIGVQTTEISKSALELAAITGNADNLKSVDVFVDRFVQGERVAGQPVVLDVAAGGIDIASRKGERPALTFITPLAAPGEEQRRRTKTGKSEFTTFVEIVGKQDRWRIRDGAADTTIDLAKVVSQLVDANGVLKHSIKLDVIGGDGDDVVLANASRIHYDGGAGTNTVSYAALGRQDSITVSADGERFNVRKQLNNANVYREGVATQTTAYGKRTENVQYRHVELARVGQLVEVDTLEHVQHIIGGAGNDSITGNAHDNFLAGGSGDDRLDGGAGNDTLVGGEGQNTVIGGAGDDVFLQDLGVWSNQLDGGAGVDTVKYNVHQPSEERLERMGDTGIHADLQKGTVEKWPALNLFSVDHVKNIENLHGSRLNDRIAGDDQDNELWGHDGNDTIRGRGGDDILRGGLGLDTLYGEDGNDIFLQDDETVSDDIDGGAGLDTVDYSAMIHPGRIVAPHEYGFGIEADLSREWVRKASALGVDYYDNVRNVENVIGTSMKDVLIGDAQANTLMGQGGDDTVRGGDGDDLLFGGDGNDMLYGDAGNDTLYGGLGDDTLEGGAGNDWFGQTQAREHDVLRGGDGVDTVDYSQTGAHAGIAAGRIGLGILADLGAGRVDKLGEAGSSAYDTVSGIENVVGTELADRITGDAQANVLRGAGGADVLAGGEGDDVLLGGDGDDQLSGDAGRDRLYGEAGDDWFFQDAANAGNLLDGGDGRDTVDFSGPGRGLDAGAKGVFLSLGKGFASLMDEPETSNVLRNIENAVGSARDDVLIGDAGANVLNGLAGNDVLSGGAGDDVLLGDEGSDLLSGDAGNDDLFGGQGDDTYLFGVGYGHDTIYESGGGHDTIRINAGADQLWFARQGNDLEIRILGTDDALTVHDWYRDADHRVEIIHAANQAVDQAGIEKLVEAMAQYPDPGAAAAAPPAARVPDTLMQSLAVNWR

SEQ ID NO: 68 - DNA, 11776 bp, Artificial Sequence
  Plasmid comprising SEQ ID NO:65
atcgagatctgtatggctgtgcaggtcgtaaatcactgcataattcgtgtcgctcaaggcgcactcccgttctggataatgttttttgcgccgacatcataacggttctggcaaatattctgaaatgagctgttgacaattaatcatcggctcgtataatgtgtggaattgtgagcggataacaattataattttgtttaactttaagaaggagatatacatatgcagcagtcccatcaggccggttacgcaaacgcagccgatcgtgaatctggtatcccggcagcggttctggatggtattaaggcagttgccaaagagaagaacgctaccctgatgttccgtctggtcaacccacactctacttccctgatcgcggaaggtgtggcgaccaaaggcctgggtgtgcacgccaaaagcagcgactggggtctgcaggcaggttatattccggtgaacccgaatctgtctaaactgttcggtcgtgccccggaggtgatcgcacgtgcagacaacgatgtcaactcttctctggcgcatggtcacaccgcggttgatctgaccctgtccaaagaacgcctggattacctgcgtcaggcgggcctggtgacgggcatggccgacggtgttgtagcgagcaaccacgcgggttatgaacaatttgagtttcgcgttaaagagacctctgacggtcgttacgcggtgcagtaccgccgcaaaggtggcgatgactttgaagctgtcaaagtgatcggtaacgctgctggaattgaagacgaaatcgacggccctgcgggccaggctgaaccagatcgtgctcactacaacatcgtaactttttgctgtaagtgcgatagcactctgcgtctgtgcgtacagtctactcacgttgatatccgcactctggaagatctgctgatgggtaccctgggtatcgtctgcccaatctgctctcaaaagcctgcttctggtgttaaccatcagcacctgccggctcgtctgcgctgaaccacagcgtcacacgatgctgtgcatgtgttgcaaatgcgaggctcgcatcgaactggttgttgaatccagcgctgacgacctgcgtgcgtttcagcaactgttcctgaacacgctgtcttttgtttgtccgtggtgtgcctcccagcaggagaacgatgaagcggatggcgtgtcccacgcgcagctgccggcacgtcgtgcagaaccgcagcgccacaagattctgtgcgtttgctgtaaatgtgatggccgtatcgaactgactgtggaatcctccgcggaagatctgcgtacgctgcagcagctgttcctgtctaccctgtctttcgtgtgcccgtggtgcgccaccaatcaaatgcacggcgacaccccgaccctgcacgaatacatgctggacctgcagccggaaaccacggatctgtattgttatgaacagctgaacgatagcagcgaggaaatgcacggtccgaaagcaactctgcaggacattgtgctgcatctggagccacagaacgaaatcccggttgatctgctgtgccacgagcaactgagcgattccgaagaggaaaacgacgaaattgatatgcatggtccgcgcgagaccctgcaagaaatcgtcctgcacctggaaccgcaaaacgaactggaccctgtagacctgctgtgctacgaacagctgtccgaatctgaagaaccgggcctgcgccgtccgtccctgggcgcagtcgaacgtcaggactccggctacgattccctggatggcgttggctcccgctccttctccctgggcgaggtttctgacatggctgcggtggaagcggcagagctggaaatgacccgtcaagtgctgcacgcgggcgcacgtcaggacgatgctgagccgggcgtgtccggtgcgtctgcacactggggtcaacgtgccctgcagggtgctcaagctgtcgcggcagcgcagcgtctggtacatgcgatcgcactgatgacccagttcggtcgcgcaggttctaccaacactcctcaggaagcagctagcctgtctgctgctgttttcggtctgggcgaagcgtcttctgcggttgcagaaaccgtgagcggtttcttccgtggttctagccgctgggcgggtggttttggtgtagcaggtggcgctatggccctgggtggcggtatcgcggctgctgtcggcgcaggtatgagcctgaccgacgatgctcctgcgggccagaaagccgcagctggcgctgaaatcgcgctgcagctgactggtggtaccgttgaactggctagctctatcgcgctggctctggcagcggcacgtggcgtgacttctggcctgcaagtcgccggtgcctctgcgggcgctgctgcgggcgctctggcagctgcactgtcccccatggaaatctacggtctggtacagcagtctcactacgcagaccagctggataaactggcgcaggagtcttctgcatacggttacgaaggcgacgcactgctggcgcagctgtatcgtgacaaaactgctgctgaaggtgctgtggcaggcgtttctgcggtactgtctaccgttggcgctgcggtttctattgcggctgccgcatccgttgtaggtgcgccggttgctgtagttacctctctgctgactggtgcactgaacggtatcctgcgtggtgttcagcagcctattatcgaaaaactggcgaatgattatgcccgtaaaatcgacgaactgggcggtccgcaggcttattttgaaaaaaacctgcaggcgcgccacgaacagctggcaaacagcgacggcctgcgcaaaatgctggcagacctgcaagctggttggaacgcgtcttctgtgatcggcgtgcagaccaccgaaattagcaaatctgcgctggaactggctgcaattactggcaacgcggataacctgaaaagcgttgatgtttttgtcgatcgcttcgttcagggcgagcgcgttgctggtcagccggttgttctggacgttgcggcaggcggcatcgacatcgctagccgcaagggcgagcgtccggctctgactttcattaccccgctggcagctccgggtgaagaacagcgtcgccgtaccaagactggtaaaagcgagttcaccaccttcgtggaaatcgtaggtaaacaggaccgctggcgtattcgcgacggtgcggcggacaccaccatcgacctggcaaaagttgtttcccaactggtagatgctaacggcgtgctgaaacattctattaaactggatgtaatcggcggtgacggcgatgacgttgtactggcgaacgcgtctcgtatccactatgacggcggcgcaggtaccaacacggtttcctacgcagcgctgggccgccaggattccatcactgttagcgccgatggcgaacgtttcaacgtgcgtaaacagctgaataacgcaaacgtctatcgtgagggtgtagctacccagaccaccgcgtacggtaagcgtaccgaaaacgttcagtatcgtcacgtggaactggcacgtgtgggtcagctggtagaggtggatacgctggaacacgtgcagcacatcatcggtggcgccggtaacgattccattactggtaacgctcacgacaacttcctggcaggtggttctggtgatgatcgtctggacggtggtgcgggtaacgatacgctggtaggcggcgaaggtcagaacaccgtaattggtggtgccggtgacgacgttttcctgcaggatctgggcgtttggagcaaccagctggatggcggtgccggtgttgacacggttaagtataacgttcaccagccgtctgaagagcgcctggaacgtatgggtgacactggtattcatgccgatctgcagaaaggcactgttgaaaaatggcctgcgctgaacctgttctctgtggaccatgttaagaacattgaaaacctgcatggctctcgcctgaacgaccgtatcgctggtgacgaccaggataacgaactgtggggtcatgacggcaatgataccattcgcggtcgtggcggcgacgatattctgcgtggcggtctgggcctggataccctgtatggtgaagatggtaacgatattttcctgcaagacgatgaaacggtatctgatgacatcgacggtggtgcaggcctggacaccgtagattacagcgctatgatccatccgggtcgtatcgtagctccgcacgagtacggcttcggtatcgaggcggacctgtctcgtgaatgggttcgtaaagcgtccgcgctgggtgtggactactacgataacgttcgtaacgtggaaaacgtgatcggtacctccatgaaagacgtgctgattggcgacgcacaggccaacactctgatgggccagggcggtgatgacacggttcgcggcggcgacggtgatgacctgctgttcggtggtgacggcaacgacatgctgtacggcgacgcgggcaacgacaccctgtacggcggtctgggtgacgacactctggaaggtggtgcaggtaacgactggttcggccaaacccaggcacgcgaacacgacgtgctgcgtggtggcgacggcgtagacaccgtggattactcccaaactggcgctcacgcgggtatcgcggccggtcgtatcggtctgggcattctggccgatctgggtgccggccgtgtcgacaaactgggtgaggctggctctagcgcctatgatactgtttccggcatcgaaaacgtggtaggcactgaactggcagatcgtatcacgggtgacgcgcaagcgaacgttctgcgtggtgctggcggtgcagacgtgctggcgggtggtgaaggcgacgacgtactgctgggcggtgacggtgacgatcagctgagcggtgatgcgggtcgtgaccgtctgtacggtgaagcaggtgacgattggttcttccaggacgctgctaacgctggcaacctgctggacggcggcgatggccgtgacactgttgacttcagcggtccgggtcgcggtctggacgcaggcgcgaaaggcgttttcctgagcctgggtaagggtttcgcatctctgatggacgaaccagaaaccagcaatgtcctgcgtaacatcgaaaacgctgtcggttccgcacgcgatgatgttctgattggcgatgctggtgccaatgttctgaacggtctggcgggtaatgatgtactgtctggtggcgctggtgatgatgtcctgctgggtgatgagggcagcgatctgctgtccggcgatgccggcaacgacgatctgttcggtggccaaggtgatgatacttacctgttcggcgttggctatggtcatgacaccatctatgagtctggtggcggccacgatacgattcgtattaatgcaggtgctgaccaactgtggtttgcacgtcagggtaacgatctggaaattcgcatcctgggtactgatgacgctctgaccgtacacgactggtaccgcgatgcggatcaccgcgtagaaatcatccatgcggctaaccaagctgtagaccaggctggtattgaaaaactggtagaagcgatggcacagtatccggacccaggtgcggctgctgcagcacctccagcggctcgtgtgccggataccctgatgcagagcctggccgtcaattggcgttaatggatccaggcctctttagaaggagatataccatgctgccgtctgcacaggcgccgtctctgctgaatccaactgatgacttcgctgcgctgggtaacatcgcgtggctgtggatgaacagcccgatgcaccgtgactggccggttcacctgctggcacgtaacacgctggcgccgatccagctgggtcaatacatcctgctgcgttgtaacgacgtgcctgtggcgtattgctcctgggcactgatggatgcggataccgagctgtcctacgttatggccccatctagcctgggcggtaacgcttggaactgcggcgatcgtctgtggatcattgattggattgctccgtttagccgtgacgacaaccgtgctctgcgtcgcgcgctggccgaacgtcatccggattctgttggccgttccctgcgcgtacgtcgcggtggcgacaccgctcgcgtcaaagaataccgtggtcgtgctctggacgcagcggcggcccgcgctcagctggaccgctaccacgcagaactgattgccggtctgcgtgcatccaatggcggttatgctccgcgtggccgtggcaccgcataatctagaattctttaattaaagatccggctgctaacaaagcccgaaaggaagctgagttggctgctgccaccgctgagcaatccaggcatcaaataaaacgaaaggctcagtcgaaagactgggcctttcgttttatctgttgtttgtcggtgaacgctctcctgagtaggacaaatccgccgggagcggatttgaacgttgcgaagcaacggcccggagggtggcgggcaggacgcccgccataaactgccaggcatcaaattaagcagaaggccatcctgacggatggcctttttgctagcagcacgccatagtgactggcgatgctgtcggaatggacgatatcccgcaagaggcccggcagtaccggcataaccaagcctatgcctacagcatccagggtgacggtgccgaggatgacgatgagcgcattgttagatttcatacacggtgcctgactgcgttagcaatttaactgtgataaactaccgcattaaagcttatcgatgataagctgtcaaacatgagaattcttagaaaaactcatcgagcatcaaatgaaactgcaatttattcatatcaggattatcaataccatatttttgaaaaagccgtttctgtaatgaaggagaaaactcaccgaggcagttccataggatggcaagatcctggtatcggtctgcgattccgactcgtccaacatcaatacaacctattaatttcccctcgtcaaaaataaggttatcaagtgagaaatcaccatgagtgacgactgaatccggtgagaatggcaaaagcttatgcatttctttccagacttgttcaacaggccagccattacgctcgtcatcaaaatcactcgcatcaaccaaaccgttattcattcgtgattgcgcctgagcgagacgaaatacgcgatcgctgttaaaaggacaattacaaacaggaatcgaatgcaaccggcgcaggaacactgccagcgcatcaacaatattttcacctgaatcaggatattcttctaatacctggaatgctgttttcccggggatcgcagtggtgagtaaccatgcatcatcaggagtacggataaaatgcttgatggtcggaagaggcataaattccgtcagccagtttagtctgaccatctcatctgtaacatcattggcaacgctacctttgccatgtttcagaaacaactctggcgcatcgggcttcccatacaatcgatagattgtcgcacctgattgcccgacattatcgcgagcccatttatacccatataaatcagcatccatgttggaatttaatcgcggcctcgagcaagacgtttcccgttgaatatggctcataacaccccttgtattactgtttatgtaagcagacagttttattgttcatgaccaaaatcccttaacgtgagttttcgttccactgagcgtcagaccccgtagaaaagatcaaaggatcttcttgagatcctttttttctgcgcgtaatctgctgcttgcaaacaaaaaaaccaccgctaccagcggtggtttgtttgccggatcaagagctaccaactctttttccgaaggtaactggcttcagcagagcgcagataccaaatactgtccttctagtgtagccgtagttaggccaccacttcaagaactctgtagcaccgcctacatacctcgctctgctaatcctgttaccagtggctgctgccagtggcgataagtcgtgtcttaccgggttggactcaagacgatagttaccggataaggcgcagcggtcgggctgaacggggggttcgtgcacacagcccagcttggagcgaacgacctacaccgaactgagatacctacagcgtgagctatgagaaagcgccacgcttcccgaagggagaaaggcggacaggtatccggtaagcggcagggtcggaacaggagagcgcacgagggagcttccagggggaaacgcctggtatctttatagtcctgtcgggtttcgccacctctgacttgagcgtcgatttttgtgatgctcgtcaggggggcggagcctatggaaaaacgccagcaacgcggcctttttacggttcctggccttttgctggccttttgctcacatgttctttcctgcgttatcccctgattctgtggataaccgtattaccgcctttgagtgagctgataccgctcgccgcagccgaacgaccgagcgcagcgagtcagtgagcgaggaagcggaagagcgcctgatgcggtattttctccttacgcatctgtgcggtatttcacaccgcaatggtgcactctcagtacaatctgctctgatgccgcatagttaagccagtatacactccgctatcgctacgtgactgggtcatggctgcgccccgacacccgccaacacccgctgacgcgccctgacgggcttgtctgctcccggcatccgcttacagacaagctgtgaccgtctccgggagctgcatgtgtcagaggttttcaccgtcatcaccgaaacgcgcgaggcagctgcggtaaagctcatcagcgtggtcgtgaagcgattcacagatgtctgcctgttcatccgcgtccagctcgttgagtttctccagaagcgttaatgtctggcttctgataaagcgggccatgttaagggcggttttttcctgtttggtcactgatgcctccgtgtaagggggatttctgttcatgggggtaatgataccgatgaaacgagagaggatgctcacgatacgggttactgatgatgaacatgcccggttactggaacgttgtgagggtaaacaactggcggtatggatgcggcgggaccagagaaaaatcactcagggtcaatgccagcgcttcgttaatacagatgtaggtgttccacagggtagccagcagcatcctgcgatgcagatccggaacataatggtgcagggcgctgacttccgcgtttccagactttacgaaacacggaaaccgaagaccattcatgttgttgctcaggtcgcagacgttttgcagcagcagtcgcttcacgttcgctcgcgtatcggtgattcattctgctaaccagtaaggcaaccccgccagcctagccgggtcctcaacgacaggagcacgatcatgcgcacccgtggccaggacccaacgctgcccgagatgcgccgcgtgcggctgctggagatggcggacgcgatggatatgttctgccaagggttggtttgcgcattcacagttctccgcaagaattgattggctccaattcttggagtggtgaatccgttagcgaggtgccgccggcttccattcaggtcgaggtggcccggctccatgcaccgcgacgcaacgcggggaggcagacaaggtatagggcggcgcctacaatccatgccaacccgttccatgtgctcgccgaggcggcataaatcgccgtgacgatcagcggtccaatgatcgaagttaggctggtaagagccgcgagcgatccttgaagctgtccctgatggtcgtcatctacctgcctggacagcatggcctgcaacgcgggcatcccgatgccgccggaagcgagaagaatcataatggggaaggccatccagcctcgcgtcgcgaacgccagcaagacgtagcccagcgcgtcggccgccatgccggcgataatggcctgcttctcgccgaaacgtttggtggcgggaccagtgacgaaggcttgagcgagggcgtgcaagattccgaataccgcaagcgacaggccgatcatcgtcgcgctccagcgaaagcggtcctcgccgaaaatgacccagagcgctgccggcacctgtcctacgagttgcatgataaagaagacagtcataagtgcggcgacgatagtcatgccccgcgcccaccggaaggagctgactgggttgaaggctctcaagggcatcggtcgactcatagctgtttcctgtgtgaaattgttatccgctcacaattccacacaacatacgagccggaagcataaagtgtaaagcctggggtgcctaatgagtgagctaacttacattaattgcgttgcgctcactgcccgctttccagtcgggaaacctgtcgtgccagctgcattaatgaatcggccaacgcgcggggagaggcggtttgcgtattgggcgctagcgtggtttttcttttcaccagtgagacgggcaacagctgattgcccttcaccgcctggccctgagagagttgcagcaagcggtccacgctggtttgccccagcaggcgaaaatcctgtttgatggtggttaacggcgggatataacatgagctgtcttcggtatcgtcgtatcccactaccgagatatccgcaccaacgcgcagcccggactcggtaatggcgcgcattgcgcccagcgccatctgatcgttggcaaccagcatcgcagtgggaacgatgccctcattcagcatttgcatggtttgttgaaaaccggacatggcactccagtcgccttcccgttccgctatcggctgaatttgattgcgagtgagatatttatgccagccagccagacgcagacgcgccgagacagaacttaatgggcccgctaacagcgcgatttgctggtgacccaatgcgaccagatgctccacgcccagtcgcgtaccgtcttcatgggagaaaataatactgttgatgggtgtctggtcagagacatcaagaaataacgccggaacattagtgcaggcagcttccacagcaatggcatcctggtcatccagcggatagttaatgatcagcccactgacgcgttgcgcgagaagattgtgcaccgccgctttacaggcttcgacgccgcttcgttctaccatcgacaccaccacgctggcacccagttgatcggcgcgagatttaatcgccgcgacaatttgcgacggcgcgtgcagggccagactggaggtggcaacgccaatcagcaacgactgtttgcccgccagttgttgtgccacgcggttgggaatgtaattcagctccgccatcgccgcttccactttttcccgcgttttcgcagaaacgtggctggcctggttcaccacgcgggaaacggtctgataagagacaccggcatactctgcgacatcgtataacgttactggtttcacattcaccaccctgaattgactctcttccgggcgctatcatgccataccgcgaaaggttttgcgccattcgatggtgtcggaatttatgcggtgtgaaataccgcacagatgcgtaaggagaaaataccgcatcaggcgctcttccgcttcctcgctcactgactcgctgccaccccgtggcatgcaaggagatggcgcccaacagtcccccggccacggggcctgccaccatacccacgccgaaacaagcgctcatgagcccgaagtggcgagcccgatcttccccatcggtgatgtcggcgatataggcgccagcaaccgcacctgtggcgccggtgatgccggccacgatgcgtccggcgtagagg

SEQ ID NO: 69 - DNA, 5121 bp, Artificial Sequence
  Nucleotide sequence encoding the wild type CyaA protein of Bordetella pertussis, optimized for E. coli expression
atgcagcagtcccatcaggccggttacgcaaacgcagccgatcgtgaatctggtatcccggcagcggttctggatggtattaaggcagttgccaaagagaagaacgctaccctgatgttccgtctggtcaacccacactctacttccctgatcgcggaaggtgtggcgaccaaaggcctgggtgtgcacgccaaaagcagcgactggggtctgcaggcaggttatattccggtgaacccgaatctgtctaaactgttcggtcgtgccccggaggtgatcgcacgtgcagacaacgatgtcaactcttctctggcgcatggtcacaccgcggttgatctgaccctgtccaaagaacgcctggattacctgcgtcaggcgggcctggtgacgggcatggccgacggtgttgtagcgagcaaccacgcgggttatgaacaatttgagtttcgcgttaaagagacctctgacggtcgttacgcggtgcagtaccgccgcaaaggtggcgatgactttgaagctgtcaaagtgatcggtaacgctgctggaattccgctgaccgcggatatcgacatgtttgccatcatgcctcacctgtccaactttcgcgattccgcacgcagctctgtgacgtctggtgattccgtcactgactacctggctcgtacccgtcgtgcggcctctgaagccactggtggtctggatcgtgaacgcattgacctgctgtggaaaatcgcccgtgccggtgcgcgctctgctgttggtaccgaagcacgccgccaatttcgttacgacggcgatatgaacatcggtgtgatcacggattttgaactggaagttcgcaatgccctgaaccgtcgtgcacacgcggtcggcgcgcaggacgttgttcagcacggtacggagcagaataacccgttcccagaagcggacgaaaagatctttgttgtgtctgccaccggtgaatcccagatgctgactcgtggccagctgaaagaatacatcggccaacagcgtggcgaaggctacgttttctacgagaatcgtgcttacggcgttgcgggcaaatccctgttcgacgatggtctgggcgctgcaccgggcgttccgagcggccgttctaaattcagcccggacgtactggaaactgtgccggcttccccgggcctgcgccgtccgtccctgggcgcagtcgaacgtcaggactccggctacgattccctggatggcgttggctcccgctccttctccctgggcgaggtttctgacatggctgcggtggaagcggcagagctggaaatgacccgtcaagtgctgcacgcgggcgcacgtcaggacgatgctgagccgggcgtgtccggtgcgtctgcacactggggtcaacgtgccctgcagggtgctcaagctgtcgcggcagcgcagcgtctggtacatgcgatcgcactgatgacccagttcggtcgcgcaggttctaccaacactcctcaggaagcagctagcctgtctgctgctgttttcggtctgggcgaagcgtcttctgcggttgcagaaaccgtgagcggtttcttccgtggttctagccgctgggcgggtggttttggtgtagcaggtggcgctatggccctgggtggcggtatcgcggctgctgtcggcgcaggtatgagcctgaccgacgatgctcctgcgggccagaaagccgcagctggcgctgaaatcgcgctgcagctgactggtggtaccgttgaactggctagctctatcgcgctggctctggcagcggcacgtggcgtgacttctggcctgcaagtcgccggtgcctctgcgggcgctgctgcgggcgctctggcagctgcactgtcccccatggaaatctacggtctggtacagcagtctcactacgcagaccagctggataaactggcgcaggagtcttctgcatacggttacgaaggcgacgcactgctggcgcagctgtatcgtgacaaaactgctgctgaaggtgctgtggcaggcgtttctgcggtactgtctaccgttggcgctgcggtttctattgcggctgccgcatccgttgtaggtgcgccggttgctgtagttacctctctgctgactggtgcactgaacggtatcctgcgtggtgttcagcagcctattatcgaaaaactggcgaatgattatgcccgtaaaatcgacgaactgggcggtccgcaggcttattttgaaaaaaacctgcaggcgcgccacgaacagctggcaaacagcgacggcctgcgcaaaatgctggcagacctgcaagctggttggaacgcgtcttctgtgatcggcgtgcagaccaccgaaattagcaaatctgcgctggaactggctgcaattactggcaacgcggataacctgaaaagcgttgatgtttttgtcgatcgcttcgttcagggcgagcgcgttgctggtcagccggttgttctggacgttgcggcaggcggcatcgacatcgctagccgcaagggcgagcgtccggctctgactttcattaccccgctggcagctccgggtgaagaacagcgtcgccgtaccaagactggtaaaagcgagttcaccaccttcgtggaaatcgtaggtaaacaggaccgctggcgtattcgcgacggtgcggcggacaccaccatcgacctggcaaaagttgtttcccaactggtagatgctaacggcgtgctgaaacattctattaaactggatgtaatcggcggtgacggcgatgacgttgtactggcgaacgcgtctcgtatccactatgacggcggcgcaggtaccaacacggtttcctacgcagcgctgggccgccaggattccatcactgttagcgccgatggcgaacgtttcaacgtgcgtaaacagctgaataacgcaaacgtctatcgtgagggtgtagctacccagaccaccgcgtacggtaagcgtaccgaaaacgttcagtatcgtcacgtggaactggcacgtgtgggtcagctggtagaggtggatacgctggaacacgtgcagcacatcatcggtggcgccggtaacgattccattactggtaacgctcacgacaacttcctggcaggtggttctggtgatgatcgtctggacggtggtgcgggtaacgatacgctggtaggcggcgaaggtcagaacaccgtaattggtggtgccggtgacgacgttttcctgcaggatctgggcgtttggagcaaccagctggatggcggtgccggtgttgacacggttaagtataacgttcaccagccgtctgaagagcgcctggaacgtatgggtgacactggtattcatgccgatctgcagaaaggcactgttgaaaaatggcctgcgctgaacctgttctctgtggaccatgttaagaacattgaaaacctgcatggctctcgcctgaacgaccgtatcgctggtgacgaccaggataacgaactgtggggtcatgacggcaatgataccattcgcggtcgtggcggcgacgatattctgcgtggcggtctgggcctggataccctgtatggtgaagatggtaacgatattttcctgcaagacgatgaaacggtatctgatgacatcgacggtggtgcaggcctggacaccgtagattacagcgctatgatccatccgggtcgtatcgtagctccgcacgagtacggcttcggtatcgaggcggacctgtctcgtgaatgggttcgtaaagcgtccgcgctgggtgtggactactacgataacgttcgtaacgtggaaaacgtgatcggtacctccatgaaagacgtgctgattggcgacgcacaggccaacactctgatgggccagggcggtgatgacacggttcgcggcggcgacggtgatgacctgctgttcggtggtgacggcaacgacatgctgtacggcgacgcgggcaacgacaccctgtacggcggtctgggtgacgacactctggaaggtggtgcaggtaacgactggttcggccaaacccaggcacgcgaacacgacgtgctgcgtggtggcgacggcgtagacaccgtggattactcccaaactggcgctcacgcgggtatcgcggccggtcgtatcggtctgggcattctggccgatctgggtgccggccgtgtcgacaaactgggtgaggctggctctagcgcctatgatactgtttccggcatcgaaaacgtggtaggcactgaactggcagatcgtatcacgggtgacgcgcaagcgaacgttctgcgtggtgctggcggtgcagacgtgctggcgggtggtgaaggcgacgacgtactgctgggcggtgacggtgacgatcagctgagcggtgatgcgggtcgtgaccgtctgtacggtgaagcaggtgacgattggttcttccaggacgctgctaacgctggcaacctgctggacggcggcgatggccgtgacactgttgacttcagcggtccgggtcgcggtctggacgcaggcgcgaaaggcgttttcctgagcctgggtaagggtttcgcatctctgatggacgaaccagaaaccagcaatgtcctgcgtaacatcgaaaacgctgtcggttccgcacgcgatgatgttctgattggcgatgctggtgccaatgttctgaacggtctggcgggtaatgatgtactgtctggtggcgctggtgatgatgtcctgctgggtgatgagggcagcgatctgctgtccggcgatgccggcaacgacgatctgttcggtggccaaggtgatgatacttacctgttcggcgttggctatggtcatgacaccatctatgagtctggtggcggccacgatacgattcgtattaatgcaggtgctgaccaactgtggtttgcacgtcagggtaacgatctggaaattcgcatcctgggtactgatgacgctctgaccgtacacgactggtaccgcgatgcggatcaccgcgtagaaatcatccatgcggctaaccaagctgtagaccaggctggtattgaaaaactggtagaagcgatggcacagtatccggacccaggtgcggctgctgcagcacctccagcggctcgtgtgccggataccctgatgcagagcctggccgtcaattggcgttaa

SEQ ID NO: 70 - protein, 85 aa, Artificial Sequence
  PEP225 complete sequence 85 aa (Hpv31E742-98/1-28)
AGQAKPDTSNYNIVTFCCQCESTLRLCVQSTQVDIRILQELLMGSFGIVCPNCSTRLMRGETPTLQDYVLDLQPEATDLYCYEQL

SEQ ID NO: 71 - protein, 84 aa, Artificial Sequence
  PEP226 complete sequence 84 aa (Hpv33E743-97/1-29)
GQAQPATADYYIVTCCHTCNTTVRLCVNSTASDLRTIQQLLMGTVNIVCPSCAQLMRGHKPTLKEYILDLYPEPTDLYCYEQLS

SEQ ID NO: 72 - protein, 95 aa, Artificial Sequence
  PEP215 complete sequence 95aa (HPV45E7 44-106/1-32)
GVSHAQLPARRAEPQRHKILCVCCKCDGRIELTVESSAEDLRTLQQLFLSTLSFVCPWCATNQMHGPRETLQEIVLHLEPQNELDPVDLLCYEQL

SEQ ID NO: 73 - protein, 84 aa, Artificial Sequence
  PEP235 complete sequence 84 aa (Hpv52E745-99/1-29 modified to deleted an auto-immune antigen)
GQAEQATSNYYIVTYCHSCDSTLRLCIHSTATDLRTLQQLLMGTLQVVCPGCARLMRGDKATIKDYILDLQPETTDLHCYEQLG

SEQ ID NO: 74 - protein, 84 aa, Artificial Sequence
  PEP228 complete sequence 84 aa (HPV58E744-98/1-29)
GQAQPATANYYIVTCCYTCDTTVRLCINSTTTDVRTLQQLLMGTCTIVCPSCAQQMRGNNPTLREYILDLHPEPTDLFCYEQLC

SEQ ID NO: 75 - DNA, 255 bp, Artificial Sequence
  DNA SEQUENCE OF PEP225 (Hpv31E742-98/1-28)
gcgggtcaagccaaaccggatacctccaactacaacattgtgaccttctgttgtcaatgcgagagcacgctgcgtctgtgtgttcaaagcacccaggttgacattcgtatcctgcaagaactgctgatgggctcttttggcatcgtctgcccaaattgcagcactcgcctgatgcgtggtgaaacgccgaccctgcaggattatgtgttggacttgcagccggaggcaacggacctgtactgctatgagcagctg

SEQ ID NO: 76 - DNA, 252 bp, Artificial Sequence
  DNA SEQUENCE OF PEP226  (Hpv33E743-97/1-29)
ggtcaggcgcaaccggccacggcggactactatatcgtgacctgttgccacacctgcaacactaccgttcgcttgtgtgtcaatagcaccgcttccgatctgcgtaccattcaacaactgctgatgggtaccgttaacatcgtgtgcccgagctgcgcacagctgatgcgtggccataagccgacgctgaaagagtatattctggacctgtacccagagccgacggatttgtactgttatgaacagctgagc

SEQ ID NO: 77 - DNA, 285 bp, Artificial Sequence
  DNA SEQUENCE OF PEP215 (HPV45E7 44-106/1-32)
ggtgtttctcacgcacaactgccagcgcgtcgcgcggaaccgcaacgtcataagatcctgtgtgtgtgctgcaaatgcgacggccgcattgagctgactgtagaatcctctgctgaagacctgcgtacgctgcagcagctgtttctgagcaccctgtctttcgtctgtccttggtgcgccaccaaccagatgcacggtccgcgtgagaccctgcaggaaatcgtgctgcacctggaaccgcagaatgaactggacccggttgatctgctgtgttacgaacagctg

SEQ ID NO: 78 - DNA, 252 bp, Artificial Sequence
  DNA SEQUENCE OF PEP235 (Hpv52E745-99/1-29 modified to delete an auto-immune antigen
ggccaggcggagcaggcgacgagcaactactacattgtcacgtattgccattcctgtgatagcactctgcgtctgtgtatccacagcacggcaaccgatctgcgtaccttgcaacaactgctgatgggcaccctgcaggtggtttgtccgggttgcgctcgcctgatgcgtggtgacaaggccaccattaaagattacatcctggacttgcaaccggaaaccaccgacctgcactgctatgagcagctgggt

SEQ ID NO: 79 - DNA, 252 bp, Artificial Sequence
  DNA SEQUENCE OF PEP228 (HPV58E744-98/1-29)
ggccaggcgcagccagcgacggccaattactacatcgttacctgttgctatacgtgcgatactaccgtccgtctgtgcattaacagcaccaccacggacgtgcgtaccctgcaacagctgctgatgggtacctgcacgattgtttgtccgagctgtgcacaacaaatgcgcggtaataacccgaccttgcgtgagtatatcttggacctgcacccggagccgaccgatctgttctgttacgaacagctgtgc

SEQ ID NO: 80 - protein, 5 aa, Artificial Sequence
  Synthetic peptide
  misc_feature (2)..(2): Xaa can be any naturally occurring amino acid
  misc_feature (4)..(4): Xaa can be any naturally occurring amino acid
LXCXE

SEQ ID NO: 81 - protein, 7 aa, Artificial Sequence
  Synthetic peptide
GVNHQHL

SEQ ID NO: 82 - protein, 4 aa, Artificial Sequence
  Synthetic peptide
MGIR

SEQ ID NO: 83 - protein, 17 aa, Artificial Sequence
  Synthetic peptide
SRDHMVLHEYVNAAGIT

SEQ ID NO: 84 - protein, 4 aa, Artificial Sequence
  Synthetic peptide
GSDR

SEQ ID NO: 85 - protein, 21 aa, Artificial Sequence
  Synthetic peptide
MEVGWYRSPFSRVVHLYRNGK

SEQ ID NO: 86 - protein, 8 aa, Artificial Sequence
  Synthetic peptide
SIINFEKL

SEQ ID NO: 87 - protein, 20 aa, Artificial Sequence
  Synthetic peptide
VRVDMVRHRIKEHMLKKYTQ

SEQ ID NO: 88 - protein, 9 aa, Artificial Sequence
  Synthetic peptide
IYSTVASSL

SEQ ID NO: 89 - protein, 4 aa, Artificial Sequence
  Synthetic peptide
SGEK

SEQ ID NO: 90 - protein, 17 aa, Artificial Sequence
  Synthetic peptide
ISQAVHAAHAEINEAGR

SEQ ID NO: 91 - protein, 10 aa, Artificial Sequence
  Synthetic peptide
ELAGIGILTV

SEQ ID NO: 92 - protein, 13 aa, Artificial Sequence
  Synthetic peptide
PKYVKQNTLKLAT

SEQ ID NO: 93 - protein, 9 aa, Artificial Sequence
  Synthetic peptide
KAVYNFATC

SEQ ID NO: 94 - protein, 70 aa, Artificial Sequence
  Synthetic peptide
RKVAELVHFLLLKYRAREPVTKAEMLGSVVGNWQYFFPVIFSKASSSLQLVFGIELMEVDPIGHLYIFAT

SEQ ID NO: 95 - protein, 42 aa, Artificial Sequence
  Synthetic peptide
KLLTQHFVQENYLEYRQVPGSDPACYEFLWGPRALVETSYVK

SEQ ID NO: 96 - protein, 88 aa, Artificial Sequence
  Synthetic peptide
MHGDTPTLHEYMLDLQPETTDLYCYEQLNGPAGQAEPDRAHYNIVTFCCKCDSTLRLCVQSTHVDIRTLEDLLMGTLGIVCPICSQKP

SEQ ID NO: 97 - protein, 97 aa, Artificial Sequence
  Synthetic peptide
MHGPKATLQDIVLHLEPQNEIPVDLLCHEQLSASGVNHQHLPARRAEPQRHTMLCMCCKCEARIELVVESSADDLRAFQQLFLNTLSFVCPWCASQQ

SEQ ID NO: 98 - protein, 4 aa, Artificial Sequence
  Synthetic peptide
LKGP
